(19) United States
(12) Patent Application Publication
(10) Pub. No.: US 2025/0002934 A1
(43) Pub. Date: Jan. 2, 2025

(54) METHODS AND COMPOSITIONS RELATING TO MAINTAINER LINES FOR MALE-STERILITY

(71) Applicant: ELSOMS DEVELOPMENTS LIMITED, Spalding, Lincolnshire (GB)

(72) Inventors: Anthony Gordon KEELING, Spalding (GB); Matthew MILNER, Cambridge (GB)

(73) Assignee: ELSOMS DEVELOPMENTS LIMITED, Spalding, Lincolnshire (GB)

(21) Appl. No.: 18/291,728

(22) PCT Filed: Jul. 26, 2022
(86) PCT No.: PCT/US2022/074126

§ 371 Date: Jan. 24, 2024

Related U.S. Application Data
(60) Provisional application No. 63/321,392, filed on Mar. 18, 2022.
(60) Provisional application No. 63/279,275, filed on Nov. 15, 2021.
(60) Provisional application No. 63/232,735, filed on Aug. 13, 2021.
(60) Provisional application No. 63/225,686, filed on Jul. 26, 2021.

(51) Int. Cl. C12N 15/82; A01H 1/00; A01H 1/02

(52) U.S. Cl. CPC C12N 15/8289; A01H 1/023; A01H 1/107; C12N 15/8212

(57) ABSTRACT

The methods and compositions described herein relate to maintainer lines (e.g, male-fertile lines) for fertilizing male-sterile plants and, due to their pollen not containing any expressed male-fertility gene, permitting the production or propagation of plants with a maintained male-sterile phenotype.

### CROSS-REFERENCE TO RELATED APPLICATIONS

[0001] This application claims benefit under 35 U.S.C. § 119(e) of U.S. Provisional Application Nos. 63/225,686 filed Jul. 26, 2021, 63/232,735 filed Aug. 13, 2021, 63/279,275 filed Nov. 15, 2021, and 63/321,392 filed Mar. 18, 2022, the contents of which are incorporated herein by reference in their entireties.

### SEQUENCE LISTING

[0002] The instant application contains a Sequence Listing which has been submitted in XML format via EFS-Web and is hereby incorporated by reference in its entirety. Said XML copy, created on Jul. 25, 2022, is named 077524-098450WOPT_SL.xml and is 1,000,749 bytes in size.

### TECHNICAL FIELD

[0003] The technology described herein relates to engineered plants, e.g., maintainer lines for male-sterile plants.

### BACKGROUND

[0004] Male-sterile lines, particularly recessive male-steriles which can be pollinated by wild-type pollen which restores fertility to the progeny, are of significant value in plant breeding operations, allowing certainty in the production of hybrids and avoiding costly manual procedures. However, a male-sterile line obviously cannot propagate itself. Instead, the male-sterile line is propogated via the use of a maintainer line whose pollen carries the same male-sterile alleles as the cognate male-sterile plant. The genetics of maintainer lines vary, but the general concept is that the line is arranged in such a way that the pollen produced can cross with a cognate male-sterile plant to produce a next generation of male-sterile plants without transferring male-fertilty. The maintainer line is further arranged such that at least a proportion of self-pollination propogates the same maintainer line genotype of the parent plant.

[0005] However, maintainer lines for recessive male-sterility lines have traditionally necessitated heavily transgenic and/or GMO approaches. Typical approaches that are incorporated into maintainer lines include expression cassettes or transgenes to “rescue” the male-sterility or transgenic cassettes designed to induce death or ineffectiveness of pollen or ovules of the undesired genotypes. In view of current worldwide agricultural regulatory approaches, such maintainer lines can be difficult and expensive to bring to bear and, in some regions/jurisdictions, unacceptable to the market.

### SUMMARY

[0006] Described herein is an approach to engineering a maintainer line (e.g., a wheat maintainer line) that minimizes or eliminates transgenic sequence use. As described herein, this maintainer lines requires the introduction or introgression of only two genes, both of which are Triticum genes from the same or a cross-transferable species. In some embodiments, the maintainer lines described herein relate to the introduction or introgression of only two constructs. In some embodiments, the maintainer lines described herein relate to the introduction or introgression of only three genes. This advance in maintainer line technology provides plants which are cheaper to produce and have broader applicability, e.g., by avoiding or minimizing the transgenic material that is utilized. Furthermore such advances in inserting native genes in their endogenous genomic form (cis-genesis or intra-genesis; with “cis-genesis” as used herein referring to both cis-genesis and intragenesis inclusively) and at defined, more beneficial loci, mean that knockouts of the genes concerned in endogenous loci are now feasible.

[0007] In one aspect of any of the embodiments, described herein is a maintainer line comprising the modifications engineered by the following process, or a maintainer line made by the following process. In one aspect of any of the embodiments, described herein is the following process for preparing or providing a maintainer line.
[0008] 1. A pre-meiosis male-fertility gene is designed which is based on an endogenous gene (e.g., MF) but is subtly changed or different from the wild-type DNA sequence to have a DNA sequence which, at a gene-editing point, has a few bp that are different to the endogenous version [so denoted MF′] but which are ‘synonyms’ of the endogenous original and so translate to the identical amino-acids and protein. As explained below, the use of MF′ and PV′ genes can permit selection for the insertions and any other traits in a fully-fertile form before native MF or PV genes are knocked out. As used herein, “pre-meiosis”, used in reference to a gene, encompasses the time prior to the conclusion of meiosis while the relevant cells are still diploid. Genes can exert an effect while the cell is still sporophyte/diploid (with expression of both relevant alleles taking place (including during meiosis)), rather than when the cell is a gametophyte/haploid (e.g., when each allele is the only allele present to be expressed towards the end of meiosis and post-meiosis).
[0009] 2. A same-species endogenous endosperm-expressed seed colour gene (e.g., denoted BA for blue aleurone) is provided in a construct with the above MF′ in tight genetic linkage (e.g., immediately adjoining it) so that progeny with the above pre-meiosis (e.g., pre-conclusion of meiosis) male-fertility genotype can be colour-selected and there is no risk of the two genes being delinked by crossing over between them with resultant wrong sorting and contamination.
[0010] 3. The above pair of genes is targeted to be inserted into one chromosome at a selected locus in the plant genome. The selected locus can be, e.g, the endogenous MF or a pollen vital gene (denoted PV) locus in the plant genome, or a site which is at a different locus on the same or a separate chromosome from the MF or PV gene's endogenous locus in the plant genome (e.g., to facilitate selecting the inserted cassettes separately from the MF and PV genes which may be on the same chromosome (such as is the case with Mfw2 and Ms1). Where the plant genome is polyploid, the insertion can be made into the genome which most highly expresses the gene(s) at the selected locus.
[0011] 4. A post-meiosis male-fertility gene is designed which is based on an endogenous gene but, as in step 1 above, it is subtly changed to have a DNA sequence which, at a gene-editing point, has a few bp that are different to the endogenous version [so denoted PV′] but which are ‘synonyms’ of the endogenous original and so translate to the identical amino-acids and protein.
[0012] 5. The PV′ gene immediately above is targeted to be inserted into the same locus as described in step 3 above, but on the second chromosome of that genome, so that, after selection, it becomes an alternative allele to MF:BA at its homolgous locus.
[0013] 6. After the concurrent insertion of the MF′:BA and PV′ constructs, plants are selected which have both inserts together in the same genome like a heterozygous pair of alleles at that locus: MF′:BA/PV′. (After natural selfing of these plants, they will have seed/progeny plants 50% of which will have repeats of such heterozygous genotype, 25% which will be homozygous MF′:BA, and 25% which will be homozygous PV′.)
[0014] 7. Alternatively each of MF:BA′ and PV′ are inserted into separate wild-type plants/embryos at the same targeted locus; then, having established with PCR checks etc., that they are stably inserted the two plant types are crossed. The progeny can be screened to select a plant/plants which have heterozygous MF′:BA/PV′, or the F2 progeny can be subjected to step 8 and selection/screening performed after the knockout.
[0015] 8. Knockout of the endogenous MF and PV genes is then performed. The knockout guides will not recognise the newly inserted versions of MF and PV which comprise the changed DNA sequence at a gene-editing point (e.g., MF′ and PV′). TO plants can then be found which have a complete knockout of the endogenous MF and PV genes, leaving just the new inserts (e.g., MF′ and PV′) unaffected to be expressed and active.
[0016] 9. Successful knockout plants now endogenous pv/pv and mf/mf in any genome and homozygous PV′/PV′ or, at the same locus, PV′/null or null/null embryos/plants are immediately the new male-sterile. See, e.g., FIG. 23.
[0017] 10. Successful knockout plants from the heterozygous MF′:BA/PV′ embryos/plants—now endogenous mf/mf and pv/pv in any genome—are immediately the fertile new maintainer for the above male-sterile (but with pollen which can only contain mf knocked out pre-meiosis male-fertility, e.g., it contains inserted gene PV′ but not MF′:BA), so that, crucially, male-fertility is not transferred to the male-sterile with its knocked out, mf genes. By genetically stopping the spread of MF genes to the male-sterile from the fertile maintainer using cis-genesis and endogenous gene knockouts, the current technology avoids the need, after the event, to eliminate, e.g., by colour sorting on a large scale, the fertility genes which have been spread into the male-sterile. In this way, the current technology avoids substantial waste of resources and product and provides improvements and advantages over previously known technologies.

[0018] In one aspect of any of the embodiments, described herein is a male-fertile maintainer plant for a male-sterile polyploid plant comprising:
[0019] a first genome comprising:
   [0020] on a first chromosome of a pair of homologous chromosomes, at a single target locus, at least one functional ectopic allele of a MF gene and at least one functional ectopic allele of a seed color gene (e.g., seed coat and/or seed endosperm gene) (or at least one functional ectopic allele of each member of a set of seed color genes);
   [0021] on a second chromosome of the pair of homologous chromosomes, at the target locus corresponding to the target locus of the first chromosome of the pair of homologous chromosomes, at least one functional ectopic allele of a PV gene;
   [0022] loss-of-function alleles of the endogenous MF genes at the native MF gene loci and loss-of-function alleles of the endogenous PV genes at the native PV gene loci.
      In one aspect of any of the embodiments, described herein is a method of preparing a male-fertile maintainer plant for a male-sterile polyploid plant, the method comprising engineering a plant to comprise:
[0023] in a first genome:
   [0024] on a first chromosome of a pair of homologous chromosomes, at a single target locus, at least one functional ectopic allele of a MF gene and at least one functional ectopic allele of a seed color gene (e.g., seed coat and/or seed endosperm gene) (or at least one functional ectopic allele of each member of a set of seed color genes);
   [0025] on a second chromosome of the pair of homologous chromosomes, at the target locus corresponding to the target locus of the first chromosome of the pair of homologous chromosomes, at least one functional ectopic allele of a PV gene; and
   [0026] loss-of-function alleles of the endogenous MF genes at the native MF gene loci and loss-of-function alleles of the endogenous PV genes at the native PV gene loci.
      In some embodiments of any of the aspects, the plant further comprises at least one further genome, each of the further genomes comprising loss-of-function alleles of the endogenous MF genes at the native MF gene loci and loss-of-function alleles of the PV gene at the native PV gene loci. In some embodiments of any of the aspects, the plant further comprises at least one further genome, and the method further comprises engineering loss-of-function alleles of the endogenous MF genes at the native MF gene loci and loss-of-function alleles of the PV gene at the native PV gene loci in each of the at least one further genomes.

[0027] In some embodiments of any of the aspects, the target locus is the native MF gene locus. In some embodiments of any of the aspects, the target locus is the native PV gene locus. In some embodiments of any of the aspects, the target locus is not the native MF gene locus or the native PV gene locus. In some embodiments of any of the aspects, the ectopic allele of the MF gene and/or the ectopic allele of the PV gene is a nuclease-null allele. In some embodiments of any of the aspects, the ectopic allele of the MF gene and/or the ectopic allele of the PV gene is a CRISPR-null allele.

[0028] In one aspect of any of the embodiments, described herein is a male-fertile maintainer plant for a male-sterile polyploid plant comprising:
[0029] a first genome comprising:
   [0030] on a first chromosome of a pair of homologous chromosomes, at least one functional allele of a MF gene at the MF gene locus and at least one allele of a seed color gene (e.g., seed coat and/or seed endosperm gene) (or at least one functional ectopic allele of each member of a set of seed color genes);
   [0031] on a second chromosome of the pair of homologous chromosomes, a loss-of-function allele of the MF gene at the MF gene locus and at least one ectopic functional allele of a PV gene;
   [0032] and loss-of-function alleles of the PV gene at the native PV gene loci; and
[0033] at least one further genome, each of the further genomes comprising loss-of-function alleles of the MF gene at the native MF gene loci and loss-of-function alleles of the PV gene at the native PV gene loci.
   In one aspect of any of the embodiments, described herein is a method of preparing a male-fertile maintainer plant for a male-sterile polyploid plant, the method comprising, simultaneously or sequentially: inserting, on a first chromosome of a pair of homologous chromosomes in a first genome, at a single target locus, a construct comprising at least one functional ectopic allele of a MF gene and at least one functional ectopic allele of a seed color gene (e.g., seed coat and/or seed endosperm gene) (or at least one functional ectopic allele of each member of a set of seed color genes), optionally wherein the inserting comprises nuclease cleavage of the target locus (e.g., zinc-finger nuclease or CRISPR nuclease cleavage) and recombination or end-joining of the construct; inserting, on a second chromosome of the pair of homologous chromosomes in the first genome, at the target locus corresponding to the target locus of the first chromosome of the pair of homologous chromosomes, a construct comprising at least one functional ectopic allele of a PV gene, optionally wherein the inserting comprises nuclease cleavage of the target locus (e.g., zinc-finger nuclease or CRISPR nuclease cleavage) and/or recombination or end-joining of the construct; and mutating the endogenous MF genes at the native MF gene loci and the endogenous PV genes at the native PV gene loci to create loss-of-function alleles, optionally wherein the loss-of-function alleles are caused by contacting the genome with a site-specific guided nuclease (e.g., CRISPR) and one or more guide RNA sequences or multi-guide constructs.

[0034] In one aspect, described herein is a method of preparing a male-fertile maintainer plant for a male-sterile polyploid plant, the method comprising:

inserting, on a first chromosome of a pair of homologous chromosomes in a first genome, at a single target locus, a cassette comprising in 5′ to 3′ or 3′ to 5′ order:
[0035] a first recognition site for a first recombinase;
[0036] at least one functional ectopic nuclease null allele of a MF gene and at least one functional ectopic allele of a seed color gene (e.g., seed coat and/or seed endosperm gene) (or at least one functional ectopic allele of each member of a set of seed color genes) in either relative order;
[0037] a first recognition site for a second recombinase;
[0038] a selection gene;
[0039] a second recognition site for the first recombinase;
[0040] at least one functional ectopic nuclease-null allele of a PV gene;
[0041] a second recognition site for the second recombinase;
   thereby providing a full-cassette insertion plant;
   contacting a first progeny of the full-cassette insertion plant, or a cell thereof, with the first recombinase,
   thereby excising:
[0042] one recognition site for the first recombinase, the at least one functional ectopic nuclease null allele of a MF gene and at least one functional ectopic allele of a seed color gene (e.g., seed coat and/or seed endosperm gene) (or at least one functional ectopic allele of each member of a set of seed color genes), the first recognition site for the second recombinase, and the selection gene from the genome of the first progeny and
   thereby providing an excised first progeny comprising:
[0043] one recognition site for the first recombinase, the at least one functional ectopic nuclease-null allele of a PV gene, and the second recognition site for the second recombinase portions of the construct;
   contacting a second progeny of the full-cassette insertion plant, or a cell thereof, with the second recombinase, thereby excising:
[0044] one recognition site for the second recombinase, the selection gene, the second recognition site for the first recombinase and at least one functional ectopic nuclease-null allele of a PV gene, and
   thereby providing an excised second progeny comprising:
[0045] one recognition site for the second recombinase, the first recognition site for the first recombinase, and the at least one functional ectopic nuclease null allele of a MF gene and at least one functional ectopic allele of a seed color gene (e.g., seed coat and/or seed endosperm gene) (or at least one functional ectopic allele of each member of a set of seed color genes) portions of the construct;
   crossing the excised first progeny provided in step ii) and the excised second progeny provided in step iii), thereby providing a third progeny comprising, in a first genome,
[0046] on a first chromosome of a pair of homologous chromosomes, at a single target locus, the at least one functional ectopic nuclease-null allele of a MF gene and the at least one functional ectopic allele of a seed color gene (e.g., seed coat and/or seed endosperm gene) (or at least one functional ectopic allele of each member of a set of seed color genes);
[0047] on a second chromosome of the pair of homologous chromosomes, at the target locus corresponding to the target locus of the first chromosome of the pair of homologous chromosomes, the at least one functional ectopic nuclease-null allele of a PV gene; and
   mutating the the endogenous MF genes at the native MF gene loci and the endogenous PV genes at the native PV gene loci to create loss-of-function alleles, optionally wherein the loss-of-function alleles are caused by contacting the genome with a site-specific guided nuclease (e.g., CRISPR) and one or more guide RNA sequences or multi-guide constructs, thereby providing the male-fertile maintainer plant. In some embodiments of any of the aspects, one of first recombinase and second recombinase is Cre and the other recombinase is Flp. In some embodiments of any of the aspects, the construct is a T-DNA construct. In some embodiments of any of the aspects, one or more of the steps further comprise selection of the provided plants or cells, optionally wherein the selection is PCR selection.

[0048] In one aspect, described herein is a method of preparing a male-fertile maintainer plant for a male-sterile polyploid plant, the method comprising:
[0049] i) contacting a cell comprising a PV locus in a first chromosome and a second chromosome of a pair of homologous chromosomes in a first genome, with:
   [0050] 1) a site-specific guided nuclease (e.g., CRISPR);
   [0051] 2) one or more guide RNA sequences or multi-guide constructs specific to one or more sequences at the PV locus; and
   [0052] 3) a targeting insertion cassette comprising in 5′ to 3′ or 3′ to 5′ order: a first recognition site for a first recombinase and a second recognition site for the first recombinase;
   [0053] thereby providing a targeting insertion plant;
[0054] ii) contacting the targeting insertion plant, or first progeny of the targeting insertion plant, or a cell thereof with the first recombinase and a cassette comprising in 5′ to 3′ or 3′ to 5′ order:
   [0055] 1) a first recombination site for the first recombinase;
   [0056] 2) at least one functional ectopic nuclease null allele of a MF gene and at least one functional ectopic allele of a seed color gene (e.g., seed coat and/or seed endosperm gene) (or at least one functional ectopic allele of each member of a set of seed color genes) in either relative order; and
   [0057] 3) a second recombination site for the first recombinase;
thereby providing a cassette insertion plant;
[0058] iii) selecting a cassette insertion plant comprising a cassette insertion at one allele of the PV locus, or crossing a cassette insertion plant comprising a cassette insertion at both alleles of the PV locus with a plant with a functional PV allele at the PV locus,
thereby providing a cassette insertion plant with a cassette insertion at one PV allele in the first genome and a functional PV allele at the second PV allele in the first genome,
[0059] iv) contacting the cassette insertion plant selected in iii), or a first progeny or cell thereof, with:
   [0060] 1) a site-specific guided nuclease (e.g., CRISPR);
   [0061] 2) one or more guide RNA sequences or multi-guide constructs flanking the insertion sites, thereby excising the inserted recombination sites;
   [0062] 3) one or more guide RNA sequences or multi-guide constructs specific to the endogenous MF genes and/or flanking the endogenous MF genes, thereby mutating the endogenous MF genes at the native MF gene loci to create loss-of-function alleles;
      thereby providing the male-fertile maintainer plant. In some embodiments of any of the aspects, the contacting of step i) comprises biolistic delivery or integration. In some embodiments of any of the aspects, the contacting of step ii) comprises transforming the plant, progeny, or cell thereof with one or more T-DNAs comprising the recombinase and cassette. In some embodiments of any of the aspects, the method further comprises a step v) of segregating remaining T-DNA out of the plant or plant cells. In some embodiments of any of the aspects, the PV gene is endogenously expressed only from the first genome. In some embodiments of any of the aspects, the PV gene is PV1. In some embodiments of any of the aspects, the PV gene is PV3. In some embodiments of any of the aspects, the one or more sequences at the PV locus is one or more of SEQ ID NOs: 253-255 and 266 or the reverse complement thereof. In some embodiments of any of the aspects, the PV gene is endogenously expressed from the first genome and at least one further genome and in step iv) the plant, first progeny, or cell thereof is further contacted with one or more guide RNA sequences or multi-guide constructs specific to the endogenous PV genes and/or flanking the endogenous PV genes, thereby mutating the endogenous PV genes at the native PV gene loci to create loss-of-function alleles.

[0063] In some embodiments of any of the aspects, the at least one functional allele of a MF gene is the endogenous wild-type functional allele of the MF gene. In some embodiments of any of the aspects, the at least one functional allele of a MF gene is an ectopic copy of the MF gene. In some embodiments of any of the aspects, the at least one functional allele of a MF gene and the at least one allele of a seed color gene (e.g., seed coat and/or seed endosperm gene) (or at least one functional ectopic allele of each member of a set of seed color genes) are part of single construct. In some embodiments of any of the aspects, an ectopic allele or ectopic copy of a gene is a nuclease-null or CRISPR-null allele. In some embodiments of any of the aspects, the MF gene displays the same type of activity and shares at least 80%, at least 85%, at least 90%, at least 95%, or greater sequence identity with one or more of the genes of Table 1. In some embodiments of any of the aspects, the MF gene is selected from Table 1. In some embodiments of any of the aspects, the MF gene displays the same type of activity and shares at least 80%, at least 85%, at least 90%, at least 95%, or greater sequence identity with Mfw2. In some embodiments of any of the aspects, the MF gene is Mfw2. In some embodiments of any of the aspects, the MF gene displays the same type of activity and shares at least 80%, at least 85%, at least 90%, at least 95%, or greater sequence identity with Ms1. In some embodiments of any of the aspects, the MF gene is Ms1. In some embodiments of any of the aspects, the PV gene displays the same type of activity and shares at least 80%, at least 85%, at least 90%, at least 95%, or greater sequence identity with one or more of the genes of Table 2. In some embodiments of any of the aspects, the PV gene is selected from Table 2. In some embodiments of any of the aspects, the PV gene displays the same type of activity and shares at least 80%, at least 85%, at least 90%, at least 95%, or greater sequence identity with PV1, PV2, or PV3. In some embodiments of any of the aspects, the PV gene is PV1, PV2, or PV3. In some embodiments of any of the aspects, the MF gene displays the same type of activity and shares at least 80%, at least 85%, at least 90%, at least 95%, or greater sequence identity with Mfw2 and the PV gene displays the same type of activity and shares at least 80%, at least 85%, at least 90%, at least 95%, or greater sequence identity with one of PV1, PV2, or PV3.

[0064] In some embodiments of any of the aspects, the MF gene displays the same type of activity and shares at least 80%, at least 85%, at least 90%, at least 95%, or greater sequence identity with Mfw2 and the PV gene displays the same type of activity and shares at least 80%, at least 85%, at least 90%, at least 95%, or greater sequence identity with PV1. In some embodiments of any of the aspects, the MF gene displays the same type of activity and shares at least 80%, at least 85%, at least 90%, at least 95%, or greater sequence identity with Mfw2 and the PV gene displays the same type of activity and shares at least 80%, at least 85%, at least 90%, at least 95%, or greater sequence identity with PV3.

[0065] In some embodiments of any of the aspects, the MF gene is Mfw2 and the PV gene is one of PV1, PV2, or PV3. In some embodiments of any of the aspects, the MF gene is Mfw2 and the PV gene is PV1. In some embodiments of any of the aspects, the MF gene is Mfw2 and the PV gene is PV3.

[0066] In some embodiments of any of the aspects, the at least one allele of a seed color gene (e.g., seed coat and/or seed endosperm gene) (or at least one functional ectopic allele of each member of a set of seed color genes) is exogenous. In some embodiments of any of the aspects, the at least one allele of a seed color gene (e.g., seed coat and/or seed endosperm gene) is blue aleurone (BA). In some embodiments of any of the aspects, the at least one allele of a seed color gene (e.g., seed coat and/or seed endosperm gene) (or at least one functional ectopic allele of each member of a set of seed color genes) comprises sequences obtained from a species within the same genus as the plant. In some embodiments of any of the aspects, the the at least one allele of a seed color gene (e.g., seed coat and/or seed endosperm gene) is at least two copies and/or individual alleles of the seed color gene (e.g., seed coat and/or seed endosperm gene). In some embodiments of any of the aspects, the the at least one allele of a seed color gene (e.g., seed coat and/or seed endosperm gene) is at least three copies and/or individual alleles of the seed color gene (e.g., seed coat and/or seed endosperm gene). In some embodiments of any of the aspects, the the at least one allele of a seed color gene (e.g., seed coat and/or seed endosperm gene) is at least four copies and/or individual alleles of the seed color gene (e.g., seed coat and/or seed endosperm gene).

[0067] In some embodiments of any of the aspects, the at least one allele of a seed color gene (e.g., seed coat and/or seed endosperm gene) (or at least one functional ectopic allele of each member of a set of seed color genes) is located within 10 cM of the MF gene loci. In some embodiments of any of the aspects, the at least one allele of a seed color gene (e.g., seed coat and/or seed endosperm gene) (or at least one functional ectopic allele of each member of a set of seed color genes) is located within 1 cM of the MF gene loci. In some embodiments of any of the aspects, the at least one ectopic functional allele of a PV gene is located within 10 cM of the MF gene loci. In some embodiments of any of the aspects, the at least one ectopic functional allele of a PV gene is located within 1 cM of the MF gene loci.

[0068] In some embodiments of any of the aspects, the only exogenous sequence in the genomes is the at least one allele of a seed color gene (e.g., seed coat and/or seed endosperm gene) (or at least one functional ectopic allele of each member of a set of seed color genes). In some embodiments of any of the aspects, the only ectopic sequence in the genomes is the at least one ectopic functional allele of a PV gene.

[0069] In some embodiments of any of the aspects, the plant is tetraploid and the second genome comprises loss-of-function alleles of the MF gene at the native MF gene loci and loss-of-function alleles of the PV gene at the native PV gene loci. In some embodiments of any of the aspects, the plant is hexaploid and the second and third genomes both comprise loss-of-function alleles of the MF gene at the native MF gene loci and loss-of-function alleles of the PV gene at the native PV gene loci.

[0070] In some embodiments of any of the aspects, a loss-of-function allele comprises an engineered knock-out modification. In some embodiments of any of the aspects, a loss-of-function allele comprises an engineered excision of at least part of a coding or regulatory sequence. In some embodiments of any of the aspects, the loss-of-function allele is engineered using a site-specific guided nuclease. In some embodiments of any of the aspects, the site-specific guided nuclease is a form of CRISPR-Cas (such as CRISPR-Cas9).

[0071] In some embodiments of any of the aspects, the plant is wheat, triticale, canola/oilseed rape, indian mustard, barley, rice, oat, or rye. In some embodiments of any of the aspects, the plant is wheat.

[0072] In some embodiments of any of the aspects, the at least one allele of a seed color gene (e.g., seed coat and/or seed endosperm gene) (or at least one functional ectopic allele of each member of a set of seed color genes) comprises a sequence from T. aestivum, T durum, T. monococcum or another Triticum aestivum-crossable species.

[0073] In some embodiments of any of the aspects, the plant is hexaploid wheat or tetraploid wheat, Triticum aestivum, or Triticum durum.

[0074] In some embodiments of any of the aspects, the at least one functional ectopic allele of a MF gene and at least one functional ectopic allele of a seed color gene (e.g., seed coat and/or seed endosperm gene) (or at least one functional ectopic allele of each member of a set of seed color genes) comprises the sequence of SEQ ID NO: 173 (or the coding sequence portion thereof) or a sequence with at least 80%, 85%, 90%, or 95% sequence identity thereto; and/or wherein the at least one functional ectopic allele of a PV gene comprises the sequence of SEQ ID NO: 172 (or the coding sequence portion thereof) or 258 or a sequence encoding SEQ ID NO: 258 or a sequence with at least 80%, 85%, 90%, or 95% sequence identity thereto. In some embodiments of any of the aspects, the guide RNA sequences and/or multi-guide constructs comprise one or more of SEQ ID NOs: 22-29, 131-154, 156, 210-213, 217, 235-237, 253-255 and 266-267.

[0075] In one aspect of any of the embodiments, described herein is a method of providing a male sterile plant seed, the method comprising selecting, from seed produced by selfing a maintainer plant as described herein, seed not displaying a phenotype provided by the seed endosperm gene. In one aspect of any of the embodiments, described herein is a method of providing male sterile plant seed, the method comprising selfing a maintainer plant described herein, whereby the resulting seed not displaying a phenotype provided by the seed endosperm gene is the male sterile plant seed.

[0076] In one aspect of any of the embodiments, described herein is a method of providing a F1 hybrid seed for crop production, the method comprising collecting the seed produced by a male-sterile plant pollinated by a male-fertile plant, wherein the male-sterile plant is:
[0077] a) a plant grown from male sterile plant seed obtained by a method described herein; and/or b) comprises:
   [0078] i) loss-of-function alleles of an endogenous MF gene at each of the native MF gene loci;
   [0079] ii) loss-of-function alleles of an endogenous PV gene at each of the native PV gene loci; and
   [0080] iii) two ectopic alleles of the PV gene at a target locus.
      In one aspect of any of the embodiments, described herein is a method of providing a F1 hybrid seed for crop production, the method comprising crossing a male-sterile plant with a male-fertile plant, wherein the male-sterile plant is:
[0081] a) a plant grown from male sterile plant seed obtained by a method described herein; and/or
[0082] b) comprises:
   [0083] i) loss-of-function alleles of an endogenous MF gene at each of the native MF gene loci;
   [0084] ii) loss-of-function alleles of an endogenous PV gene at each of the native PV gene loci; and
   [0085] iii) two ectopic alleles of the PV gene at a target locus.
      In one aspect of any of the embodiments, described herein is a method of providing a F1 hybrid seed for crop production, the method comprising planting a male-sterile plant within pollination range of a male-fertile plant, wherein the male-sterile plant is:
[0086] a) a plant grown from male sterile plant seed obtained by a method described herein; and/or
[0087] b) comprises:
   [0088] i) loss-of-function alleles of an endogenous MF gene at each of the native MF gene loci;
   [0089] ii) loss-of-function alleles of an endogenous PV gene at each of the native PV gene loci; and
   [0090] iii) two ectopic alleles of the PV gene at a target locus; and

[0091] whereby the male-fertile plant pollinates the male-sterile plant and F1 hybrid seed is produced. In some embodiments of any of the aspects, the pollination range is 200 metres. In one aspect of any of the embodiments, described herein the male-sterile plant and male fertile plant are different lines.

[0092] In one aspect of any of the embodiments, described herein is a method of producing a plant crop, the method comprising:
[0093] a) planting and/or harvesting a plant or portion thereof, wherein the plant:
   [0094] i) is plant grown from F1 hybrid seed obtained by a method described herein; and/or
   [0095] ii) comprises:
      [0096] 1) in each genome of the plant, at a native MF gene locus, one functional endogenous allele of the endogenous MF gene and one loss-of-function allele of the endogenous MF gene;
      [0097] 2) in each genome of the plant, at a native PV gene locus, one functional endogenous allele of the endogenous PV gene and one loss-of-function allele of the endogenous PV gene;
      [0098] 3) one ectopic allele of the PV gene at a target locus.

### BRIEF DESCRIPTION OF THE DRAWINGS

[0099] FIG. 1 depicts a first step in producing an exemplary maintainer line.

[0100] FIG. 2 depicts how, in an exemplary embodiment, the maintainer line and initial male sterile lines are created in parallel.

[0101] FIGS. 3-4 depict how an exemplary maintainer line is propagated.

[0102] FIGS. 5-6 depict how, in an exemplary embodiment, a maintainer line is used to maintain the cognate male-sterile plants.

[0103] FIG. 7 depicts how, in an exemplary embodiment, the male-sterile plants are used for F1 seed production.

[0104] FIGS. 8-10 depict a method transferring the genetic elements of the described maintainer of male-sterility line into a second genotype by ‘conventional’ crossing and selection. Such methods can be utilized to move the genetic elements into elite lines or germplasm. Accordingly, the figures depict crossing an elite wildtype (wt) line onto a maintainer of male-sterility plant as described herein and selecting out new maintainer and male-sterile lines. In FIG. 8, seed harvested from the cross (ex maintainer) will be a 50% mix of the two depicted genotypes. This is colour-sorted, separating the 50% with darker-coloured (BA) grains (and MFW male-fertility), bottom right, from the non-coloured plants (no BA), bottom left. These two populations are planted, allowed to self-fertizile, and in the ensuing generation, individuals which are mfw/mf vx2 and mfw:PV/mfw:PV and pv/pv×3 (left, providing male-sterile individuals) and mfw/mfw×2 and MFW:BA/MFW:BA and PV/PV×3 are selected by PCR analysis (FIG. 9). These individuals are also selected for having an overall phenotype which is closest to the WT elite parent. The two selected individual plants or populations are then crossed. The plants from this cross are grown (FIG. 10, top left) and, from their progeny, PCR analysis is used to select those plants with a mfw/mfw×2+mfw:PV/MFW:BA+pv/pv×3 genotype (no wt PV allele) and maximum WT elite line genotype (FIG. 10, top center). These plants are allowed to self-fertilize. Harvested seed will be a 50% mix of the two genotypes indicated at the bottom of FIG. 10. This seed is colour-sorted, selecting the 50% with darker-coloured (BA) grains and so MFW male-fertility, (FIG. 10, bottom right), to become the new maintainer line and separately, the non-coloured seeds, (FIG. 10, bottom left), which become the new male-sterile line. The seed/plants can be subject to standard selection in recurrent pollinator/maintainer for a further five generations to achieve introgression in the elite line.

[0105] FIG. 11 depicts a schematic of the maintainer-line background (e.g., starting genetic material) genetics.

[0106] FIG. 12 depicts a schematic of the first stage of making the maintainer of male-sterility line.

[0107] FIG. 13 depicts a schematic of the maintainer and male-sterile lines.

[0108] FIG. 14 depicts the pollen and ovule production of the maintainer line.

[0109] FIG. 15 depicts the production of F1 seed by the maintainer line.

[0110] FIG. 16 depicts the maintenance of the male-sterile plant.

[0111] FIG. 17 depicts the use of the male-sterile plant to produce hybrid F1 seed.

[0112] FIGS. 18-20 depict the creation of new maintainers and male-steriles by crossing with an elite line.

[0113] FIG. 21 depicts using a herbicide tolerance gene to select the maintainer cassettes.

[0114] FIG. 22 depicts a method for creating the TO plants necessary for maintainer line production.

[0115] FIG. 23 depicts a method for creating maintainer and male-sterile lines together.

[0116] FIG. 24 depicts the maintenance of the maintainer line.

[0117] FIGS. 25-26 depict the creation of new maintainers and male-steriles by crossing with an elite line.

[0118] FIGS. 27-28 depict the maintenance of the maintainer line.

[0119] FIG. 29 depicts F1 hybrid crop seed production.

[0120] FIG. 30 depicts the creation of new maintainers and male-steriles by crossing with an elite line.

[0121] FIGS. 31A-31B depict diagrams of exemplary MF′:BA construct, utilizing Ms1′ as the MF′ gene and BA1 as the BA gene. In some embodiments, the coding sequence of BA1 is used (FIG. 31A), providing a shorter construct than required for the full length genomic BA sequence (FIG. 31B). FIG. 31C depicts a digram of an illustrative embodiment of a gene cassette for the initial stage of production of the maintainer. The maintainer can be produced by transforming a wild-type elite line with a T-DNA cassette containing the genomic sequence of Mfw2′ followed by BA1 or BA2. This will be followed by a selection gene for example nptII finally followed by the genomic sequence of PV1′ (Mfw2′ and PV1′ are the subtly different/adapted versions of Mfw2 and PV1 as described elsewhere herein). Four sequences can also be included for future modifications to separate the genes: two Cre-lox cut sequences flanking the Mfw2′, BA and Nptll selection gene and two flippase cut sequences flanking nptII, PV1′ as shown in the figure. The Mfw2′:BA and PV1′ parts can then be made into separate alleles at the same locus as follows. One or more plants/embryos retransformed with Cre-lox to drop out everything between the cre-lox sites to leave PV1′ or, similarly, a different one or more plant/embryos retransformed with flippase to leave Mfw2′:BA. The heterozygous combination of the maintainer system's two alleles can than be produced by crossing successful products of these two retransformations. The final stage to produce the maintainer is to knockout the endogenous Mfw2 and PV1 genes. This approach is described in more detail in Example 9. FIG. 31D depicts a version of the gene cassette utilizing PV3′ instead of PV1′.

[0122] FIGS. 32A and 32B depict the genotype of plants described in Example 9. FIGS. 32A-32B illustrate the genotypes by referring to MFW, MFW, PV, and PV′, while Example 9 utilizes the exemplary Mfw2 and PV1 genes. Example 9 is an exemplary embodiment and is not limiting on the technology described herein or as illustrated in FIGS. 32A-32B.

[0123] FIG. 33 depicts a schemative of the insertion of the Mfw2′:BA allele at the PV1-B locus.

[0124] FIG. 34 depicts the sequence of the gRNA locations illustrated in FIG. 33. FIG. 34 depicts SEQ ID NO: 234 gRNA, which includes sequence base pair No's 927-979, inclusive, of SEQ ID NO 188. The figure depicts the three gRNA sequences as SEQ ID NOs: 235-237.

[0125] FIGS. 35A-35C depict an overview of a procedure for producing both new maintainer and male-sterile plants together, utilizing only crossing and selection. The process proceeds from FIG. 35A to FIG. 35B to FIG. 35C as indicated by the provided arrows. See, e.g, Example 10.

### DETAILED DESCRIPTION

[0126] Described herein are plants, plant cells, and methods that relate to a F1 hybrid wheat system that can be readily incorporated into an established breeding programme. Specifically, the system comprises a male-sterile line and a cognate maintainer line. The maintainer line can 1) pollinate the male-sterile without transferring male-fertility and 2) self-pollinate without losing its necessary genetic traits. By pollinating the male-sterile without transferring male-fertility, this keeps the ‘purity’ of the male-sterile's recessive male-sterility. As a result, the male-sterile line can, in the final seed production field, be pollinated by any ‘wild-type’ elite breeding line. The system therefore provides tools for low cost-of-sale F1 seed, e.g., for sale to farmers.

[0127] In some embodiments, the methods and compositions described herein relate to polyploidal maintainer plants in which a first genome is engineered to provide a locus which controls male fertility. Specifically, on one chromosome of a homologous pair, the locus comprises a dominant male-fertile allele(s) of a male fertility (MF) gene that cosegregates with at least one allele of a seed color gene (e.g., seed coat and/or seed endosperm gene) (or at least one functional ectopic allele of each member of a set of seed color genes). On the second chromosome of the homologous pair, the locus comprises a dominant viable-pollen allele(s) of a pollen-viability (PV) gene. All other copies of MF or PV alleles are recessive loss-of-function alleles of those MF and PV genes, e.g., the second and/or further genomes comprise only recessive loss-of-function alleles of those MF and PV genes. MF genes function largely pre-meiosis and therefore, the presence of the dominant MF allele(s) in the maintainer line's pre-meiosis reproductive cells will provide reproductive functionality for the MF gene's activity, so the MF allele(s) carried by an individual pollen grain post-meiosis is not determinative of its viability. As used herein, “pre-meiosis”, used in reference to a MF gene, encompasses the time prior to the conclusion of meiosis. MF genes can exert an effect while the cell still sporophyte/diploid (with expression of both relevant alleles taking place (including during meiosis)), rather than when the cell is a gametophyte/haploid (e.g., when each allele is the only allele present to be expressed post-meiosis). Stated another way, the MF allele(s) on the first chromosome is sufficient to confer male fertility on the plant, while the absence of a functional copy(ies) results in a male-sterile plant. However, the PV gene (as described below) is post-meiosis in function, so each pollen grain carrying only pv alleles will be non-viable whatever its MF gene status. That is, at least one copy of the PV gene in a pollen grain is sufficient to support pollen development, while the absence of a functional PV allele in a pollen grain will prevent development of the pollen. Thus, male-fertility and pollen production are controlled by the genotype of the first genome.

[0128] Accordingly, in one aspect of any of the embodiments, provided herein is a male-fertile maintainer plant or cell (e.g., a maintainer plant for a male-sterile plant), the maintainer comprising: 1) a first genome comprising: a) on a first chromosome of a pair of homologous chromosomes, a functional allele(s) of a MF gene at a first locus and at least one allele of a seed color gene (e.g., seed coat and/or seed endosperm gene) (or at least one functional ectopic allele of each member of a set of seed color genes); b) on a second chromosome of the pair of homologous chromosomes, a loss-of-function allele of the MF gene at the native MF locus and at least one ectopic functional allele of a PV gene; c) loss-of-function alleles of the PV gene at the native PV gene loci; and 2) at least one further genome, each of the further genomes comprising loss-of-function alleles of the MF gene at the native MF gene loci and loss-of-function alleles of the PV gene at the native PV gene loci. In some embodiments of any of the aspects, the first locus is the native MF gene locus. In some embodiments of any of the aspects, the at least one ectopic functional allele of a PV gene is located at the native MF gene locus. In some embodiments of any of the aspects, the at least one allele of a seed color gene (e.g., seed coat and/or seed endosperm gene) (or at least one functional ectopic allele of each member of a set of seed color genes) is located at the native MF gene locus. In some embodiments of any of the aspects, the at least one allele of a seed color gene (e.g., seed coat and/or seed endosperm gene) (or at least one functional ectopic allele of each member of a set of seed color genes) is ectopic. In some embodiments of any of the aspects, the at least one allele of a seed color gene (e.g., seed coat and/or seed endosperm gene) (or at least one functional ectopic allele of each member of a set of seed color genes) is exogenous.

[0129] For illustrative purposes, FIG. 3 provides a schematic of the modifications described herein and FIGS. 3-4 depict how the maintainer line's genetics function during propagation in an exemplary embodiment. Specifically, the maintainer plant will produce viable pollen grains which comprise the second chromosome of the first genome and never the first chromosome of the first genome as the latter will comprise pollen-grains without a functional PV gene and will not be viable. When this maintainer plant self-fertilizes, the seeds can be sorted by seed endosperm color to obtain progeny with the genotype of the parent, allowing a heterozygous maintainer line to be propagated and provide a new generation of heterozygous maintainer plants at low costs of labor and time.

[0130] It is noted that the methods and compositions described herein provide surprising advantages over existing approaches based on cytoplasmic male-sterility. A major problem with cytoplasmic male-sterility is that one needs to breed the final ‘male’ pollinator-line, used to produce the F1 seed, to comprise a ‘restorer’ gene(s) to overcome the male-sterility of the ‘female line’ so that the customer's commercial crop grown from the F1 seed has full fertility. In the systems described herein, the male-sterility is recessive so any wild-type cultivar (e.g., any wild-type elite breeding line) will act as a restorer. This means that production of hybrid seed can be conducted normally by crossing the male-sterile line with a different cultivar of choice without the use of a particular restorer line. This permits production of hybrid F1 seed at lower costs than current F1 cereal plant breeding technologies.

[0131] Furthermore, the methods and compositions described herein permit these advantages without the male-sterile or F1 seed being transgenic, for example, as explained in more detail in Example 1. For example, by using genes from the same species and/or genus, which could have been introduced by traditional crossing, the instant plants and systems are considered cis-genesis genome editing, which is already accepted as non-regulated/non-GM in the US and is likely to be regulated lightly in the EU. This provides for more widespread use and available markets as compared to transgenic plants (with transgenes from non-crossable species).

[0132] It is noted that the MF, PV, and seed color gene (e.g., seed coat and/or seed endosperm gene) (or at least one functional ectopic allele of each member of a set of seed color genes) alleles/loci may be in any 5′ to 3′ order and any recitation of the genes provided herein is not meant to limit the embodiments to a particular 5′ to 3′ order. Within the term “plants” in this specification is included seeds and seedlings.

[0133] Different alleles described herein are referred to as either functional or loss-of-function alleles. As used herein, “functional” refers to a portion and/or variant of a polypeptide or gene that retains at least a detectable level of the activity of the native polypeptide or gene from which it is derived. Methods of detecting, e.g. activity and/or functionality are known in the art for various types of polypeptides. In some embodiments of any of the aspects, a functional allele can be an allele comprising, consisting of, or consisting essentially of a wild-type allele of a gene, e.g., one of the sequences provided herein. In some embodiments of any of the aspects, a functional allele can be an allele comprising, consisting of, or consisting essentially of a sequence with at least 80%, at least 85%, at least 90%, at least 95%, or greater sequence identity with a wild-type allele of a gene, e.g., one of the sequences provided herein. In some embodiments of any of the aspects, a functional allele can be an unengineered or unmodified allele, e.g., it is the wild-type allele. In some embodiments of any of the aspects, an ectopic functional allele can be a copy of a wild-type allele inserted or introduced into a different location in the genome, e.g., the ectopic functional allele does not comprise any sequence exogenous to the plant/cell. In some embodiments of any of the aspects, a functional allele comprises a coding sequence encoding a protein sequence. In some embodiments of any of the aspects, a functional allele comprises a cDNA encoding a protein sequence. In some embodiments of any of the aspects, a functional allele comprises a cDNA corresponding to a coding sequence and/or mRNA. In some embodiments of any of the aspects, a functional allele comprises a genomic sequence encoding a protein sequence. In some embodiments of any of the aspects, a functional allele comprises a genomic sequence. In some embodiments of any of the aspects, a functional allele comprises a coding sequence encoding a protein sequence described herein. In some embodiments of any of the aspects, a functional allele comprises a cDNA encoding a protein sequence described herein. In some embodiments of any of the aspects, a functional allele comprises a cDNA corresponding to a coding sequence and/or mRNA described herein. In some embodiments of any of the aspects, a functional allele comprises a genomic sequence encoding a protein sequence described herein. In some embodiments of any of the aspects, a functional allele comprises a genomic sequence described herein.

[0134] In some embodiments of any of the aspects, a construct or chromosome comprising at least one functional ectopic allele of a gene (e.g. a MF, PV, or seed color gene) comprises one functional ectopic allele of the gene. In some embodiments of any of the aspects, a construct or chromosome comprising at least one functional ectopic allele of a gene (e.g. a MF, PV, or seed color gene) comprises two functional ectopic alleles of the gene. In some embodiments of any of the aspects, a construct or chromosome comprising at least one functional ectopic allele of a gene (e.g. a MF, PV, or seed color gene) comprises three functional ectopic alleles of the gene.

[0135] In some embodiments of any of the aspects, the plant is a polyploid and a construct or chromosome comprising at least one functional ectopic allele of a gene (e.g. a MF, PV, or seed color gene) comprises one functional ectopic allele of the gene, wherein the one functional ectopic allele comprises one of the multiple homeologues of the gene. In some embodiments of any of the aspects, the plant is a polyploid and a construct or chromosome comprising at least one functional ectopic allele of a gene (e.g. a MF, PV, or seed color gene) comprises two functional ectopic alleles of the gene, wherein the two functional ectopic alleles comprise two of the multiple homeologues of the gene. In some embodiments of any of the aspects, the plant is a polyploid and a construct or chromosome comprising at least one functional ectopic allele of a gene (e.g. a MF, PV, or seed color gene) comprises three functional ectopic alleles of the gene, wherein the three functional ectopic alleles comprise three of the multiple homeologues of the gene.

[0136] In some embodiments of any of the aspects, the plant is a hexaploid and a construct or chromosome comprising at least one functional ectopic allele of a gene (e.g. a MF, PV, or seed color gene) comprises one functional ectopic allele of the gene, wherein the one functional ectopic allele comprises one of the three homeologues of the gene. In some embodiments of any of the aspects, the plant is a hexaploid and a construct or chromosome comprising at least one functional ectopic allele of a gene (e.g. a MF, PV, or seed color gene) comprises two functional ectopic alleles of the gene, wherein the two functional ectopic alleles comprise two of the three homeologues of the gene. In some embodiments of any of the aspects, the plant is a hexaploid and a construct or chromosome comprising at least one functional ectopic allele of a gene (e.g. a MF, PV, or seed color gene) comprises three functional ectopic alleles of the gene, wherein the three functional ectopic alleles comprise all three homeologues of the gene.

[0137] The term “wild type” refers to the naturally-occurring polynucleotide sequence encoding a protein, or a portion thereof, or protein sequence, or portion thereof, respectively, as it normally exists in vivo. It may also refer to the original plant genotype which was used for any transformation, gene-editing or gene-repression experiments herein, e.g., the genotype as it existed prior to any of the engineering steps described herein. Exemplary wild-type and functional alleles of MF and PV genes are provided herein, or can be a naturally-occurring MF or PV allele in a fertile plant.

[0138] As used herein “loss-of-function” refers to partial or complete reduction of the expression or activity of a protein encoded by an endogenous DNA sequence in a cell such that the protein can no longer accomplish its function. In some embodiments of any of the aspects, a loss-of-function allele comprises an engineered modification. A “modification” in a nucleic acid sequence refers to any detectable change in the genetic material, e.g., a change or alteration relative to a reference sequence, e.g, the wild-type sequence. Modifications can be insertions, deletions, replacements, indels, SNPs, mutations, substitutions, or the like. A modification is usually a change of one or more deoxyribonucleotides, the modification being obtained by, for example, adding, deleting, inverting, or substituting nucleotides.

[0139] In some embodiments of any of the aspects, a loss-of-function allele comprises, consists of, or consists essentially of an engineered excision of at least part of a coding or regulatory sequence. In some embodiments of any of the aspects, a loss-of-function allele comprises, consists of, or consists essentially of an engineered excision of an allele's promoter. In some embodiments of any of the aspects, a loss-of-function allele comprises, consists of, or consists essentially of an engineered excision of at least 5%, at least 10%, at least 20%, at least 30% or more of an allele's coding sequence. In some embodiments of any of the aspects, a loss-of-function allele comprises, consists of, or consists essentially of an engineered excision of at least 90%, at least 95%, or 100% of an allele's coding sequence. In some embodiments of any of the aspects, a loss-of-function allele comprises, consists of, or consists essentially of an engineered missense or nonsense mutation within the first 10% of the coding sequence of an allele.

[0140] In some embodiments of any of the aspects, a loss-of-function allele comprises, consists of, or consists essentially of an engineered knock-out modification. As used herein, “knock-out” refers to partial or complete reduction of the expression of a protein encoded by an endogenous DNA sequence in a cell such that the protein can no longer accomplish its function. In some embodiments, the “knock-out” can be produced by targeted deletion of the whole or part of a gene encoding a protein. In some embodiments, the deletion may prevent or reduce the expression of the functional protein in a cell in which it is normally expressed. A knock-out plant can be a transgenic plant, or can be created without transgenic methods, e.g. without the introduction of exogenous DNA to the genome.

[0141] In some embodiments of any of the aspects, a knock-out modification comprises a deletion of the whole or part of a gene encoding a protein in a cell. In some embodiments of any of the aspects, a knock-out modification comprises deletion of the entire coding sequence of the relevant gene. In some embodiments of any of the aspects, a knock-out allele does not comprise any of the coding sequence of the relevant gene. In some embodiments of any of the aspects, a knock-out modification comprises deletion of a part of the coding sequence of the relevant gene, e.g, 10%, 20%, 30%, 40%, 50%, 60%, 70%, 80%, 90% or more of the coding sequence of the relevant gene. In some embodiments of any of the aspects, a knock-out modification comprises a non-sense mutation of the relevant gene, e.g, in the first 10%, first 20%, first 30%, first 40%, first 50%, first 60%, or first 70% of the coding sequence of the relevant gene. In some embodiments of any of the aspects, a knock-out modification comprises a missense mutation of the relevant gene, e.g, in the first 10%, first 20%, first 30%, first 40%, first 50%, first 60%, or first 70% of the coding sequence of the relevant gene. In some embodiments of any of the aspects, a knock-out modification comprises the introduction of a stop codon in the relevant gene, e.g, in the first 10%, first 20%, first 30%, first 40%, first 50%, first 60%, or first 70% of the coding sequence of the relevant gene. In some embodiments of any of the aspects, a knock-out modification comprises deletion of the promoter of the relevant gene, e.g, deletion of at least 40%, at least 50%, at least 60%, at least 70%, at least 80%, at least 90% or more of the promoter of the relevant gene.

[0142] In some embodiments of any of the aspects, a loss-of-function allele comprises, consists of, or consists essentially of methylation and/or hypermethylation of the coding and/or regulatory sequence of a the relevant gene. For example, methods of introducing heritable CG-specific methylation that provides loss-of-function alleles is known in the art and can be produced using artificial zinc finger protein targeting of the CG-specific methyltransferase M.SssI, or using CRISPR technology. Further discussion of such methods can be found in the art, e.g., Liu et al. Nature Communications 2021 12:3130 and Ghoshal et al. PNAS 2021 118:e2125016118; each of which is incorporated by reference herein in its entirety. In some embodiments of any of the aspects, a loss-of-function allele comprises methylation in the allele's promoter. In some embodiments of any of the aspects, a loss-of-function allele comprises methylation of at least one cytosine in the allele's promoter. In some embodiments of any of the aspects, a loss-of-function allele comprises methylation of at least two cytosines in the allele's promoter. In some embodiments of any of the aspects, a loss-of-function allele comprises methylation of at least three cytosines in the allele's promoter. In some embodiments of any of the aspects, a loss-of-function allele comprises methylation of at least ten cytosines in the allele's promoter. In some embodiments of any of the aspects, a loss-of-function allele comprises methylation of at least twenty cytosines in the allele's promoter. In some embodiments of any of the aspects, the methylation results in an alteration of the expression of the gene relative to expression in the absence of the methylation.

[0143] As used herein, a “MF” or “malefertility” gene is a gene which, when its expression is inhibited, decreases male-fertility and which functions pre-meiosis. MF genes can be specific for male-fertility, rather than female-fertility. In some embodiments of any of the aspects, a MF gene, when fully deactivated (i.e., all copies are deactivated) in a plant, is sufficient to render the plant male-sterile, e.g., one or more copies of the MF gene is strictly necessary for male-fertility. In some embodiments of any of the aspects, the MF gene is a gene which has been identified to produce a male-sterile phenotype when a plant was modified to comprise loss-of-function alleles for that gene. In some embodiments of any of the aspects, the MF gene is pre-meiotic, e.g., it functions before meiosis or before the conclusion of meiosis (e.g., the diploid phases of meiosis). “Mfv” is used at times herein interchangeably with “MF” and may refer to wheat MF genes, e.g., where the wheat genome is used as an illustrative embodiment. Where “Mfw” is used, one of skill in the art will understand that those embodiments are equally applicable in other plant species using suitable MF genes for that species.

[0144] MF genes for various species have been described in the art, and exemplary, but non-limiting, MF genes include those described in International Patent Application PCT/US2017/043009 (referred to therein as Mpew or Mfw genes), International Patent Application PCT/US2019/019139; each of which is incorporated by reference herein in its entirety. In some embodiments of any of the aspects, the MF gene is a gene which displays the same type of activity, and/or shares at least 80%, at least 85%, at least 90%, at least 95%, or greater sequence identity with a MF gene of any of the foregoing references. In some embodiments of any of the aspects, a MF gene can be the gene from a species, cultivar, or variety which has the highest degree of homology and/or sequence identity of the genes in that species', cultivar's or variety's genome with a gene selected from one of the foregoing references.

[0145] In some embodiments of any of the aspects, the MF gene is a dominant male-fertility gene. That is, one functional allele of the MF gene is sufficient to provide male fertility. In some embodiments of any of the aspects, the dominant MF gene is Mfw2.

[0146] A non-limiting list of exemplary pre-meiosis MF genes is provided in Table 1. In some embodiments of any of the aspects, the MF gene is a gene selected from Table 1. In some embodiments of any of the aspects, the MF gene has at least 80%, at least 85%, at least 90%, at least 95%, at least 98%, or greater sequence identity with a MF gene of Table 1. In some embodiments of any of the aspects, the MF gene is a gene which displays the same type of activity, and has at least 80%, at least 85%, at least 90%, at least 95%, at least 98%, or greater sequence identity with a MF gene of Table 1. In some embodiments of any of the aspects, the MF gene has at least 95% sequence identity with a MF gene of Table 1. In some embodiments of any of the aspects, the MF gene is a gene which displays the same type of activity, and has at least 95% sequence identity with a MF gene of Table 1. In some embodiments of any of the aspects, the MF gene is a gene of Table 1. In some embodiments of any of the aspects, a MF gene can be the gene from a species, cultivar, or variety which has the highest degree of homology and/or sequence identity of the genes in that species', cultivar's or variety's genome with a gene selected from Table 1.

[0147] In some embodiments of any of the aspects, a functional allele of a MF gene shares at least 80% sequence identity with at least one sequence of Table 1. In some embodiments of any of the aspects, a functional allele of a MF gene displays the same type of activity and shares at least 80% sequence identity with at least one sequence of Table 1. In some embodiments of any of the aspects, a functional allele of a MF gene shares at least 80%, at least 85%, at least 90%, at least 95%, at least 98%, or greater sequence identity with at least one sequence of Table 1. In some embodiments of any of the aspects, a functional allele of a MF gene displays the same type of activity and shares at least 80%, at least 85%, at least 90%, at least 95%, at least 98%, or greater sequence identity with at least one sequence of Table 1. In some embodiments of any of the aspects, a functional allele of a MF gene shares at least 95% sequence identity with at least one sequence of Table 1. In some embodiments of any of the aspects a functional allele of a MF gene displays the same type of activity and shares at least 95% sequence identity with at least one sequence of Table 1. In some embodiments of any of the aspects, the functional allele of a MF gene is a sequence of Table 1.

TABLE 1
Exemplary MF genes

| | | | TGAC v1 homoeologues* - | |
|---|---|---|---|---|
| | | | the copies on the other | |
| Assigned | | | subgenomes of wheat and | |
| Mfw | | TGAC v1 gene | their associated gene | RefSeq v1.1 |
| name | Blast hit | model* | models | Sequences |
| Mfw2-A | callose | TRIAE_CS42_7AS_{—} | TRIAE_CS42_7BS_TGACV1_{—} | TraesCS7A02G146200 |
| | synthase 5 | TGACv1_569258_{—} | 593715_AA1953990; | |
| | | AA1811650 | TRIAE_CS42_7DS_TGACv1_{—} | |
| | | | 622598_AA2042310 | |
| Mfw2-B | callose | TRIAE_CS42_7BS_{—} | TRIAE_CS42_7AS_TGACV1_{—} | TraesCS7B02G048700 |
| | synthase 5 | TGACv1_593715_{—} | 569258_AA1811650; | |
| | | AA1953990 | TRIAE_CS42_7DS_TGACv1_{—} | |
| | | | 622598_AA2042310 | |
| ″ | callose | TRIAE_CS42_7BS_{—} | TRIAE_CS42_7AS_TGACV1_{—} | |
| | synthase 5 | TGACv1_593715_{—} | 569258_AA1811650; | |
| | | AA1953990 | TRIAE_CS42_7DS_TGACv1_{—} | |
| | | | 622598_AA2042310 | |
| ″ | callose | TRIAE_CS42_7BS_{—} | TRIAE_CS42_7AS_TGACV1_{—} | |
| | synthase 5 | TGACv1_593715_{—} | 569258_AA1811650; | |
| | | AA1953990 | TRIAE_CS42_7DS_TGACv1_{—} | |
| | | | 622598_AA2042310 | |
| ″ | callose | TRIAE_CS42_7BS_{—} | TRIAE_CS42_7AS_TGACV1_{—} | |
| | synthase 5 | TGACv1_593715_{—} | 569258_AA1811650; | |
| | | AA1953990 | TRIAE_CS42_7DS_TGACv1_{—} | |
| | | | 622598_AA2042310 | |
| Mfw2-D | callose | TRIAE_CS42_7DS_{—} | TRIAE_CS42_7BS_TGACv1_{—} | TraesCS7D02G147700 |
| | synthase 5 | TGACv1_622598_{—} | 593715_AA1953990; | |
| | | AA2042310 | TRIAE_CS42_7AS_TGACV1_{—} | |
| | | | 569258_AA1811650 | |
| Mfw3-A | Aborted | TRIAE_CS42_6AS_{—} | TRIAE_CS42_6BS_TGACv1_{—} | TraesCS6A02G268800 |
| | microspore | TGACv1_486918_{—} | 514404_AA1659330; | |
| | 1 like | AA1566480 | TRIAE_CS42_U_TGACv1_{—} | |
| | | | 643846_AA2135420 | |
| Mfw3-B | Aborted | TRIAE_CS42_6BS_{—} | TRIAE_CS42_6AS_TGACv1_{—} | TraesCS6B02G295900 |
| | microspore | TGACv1_514404_{—} | 486918_AA1566480; | |
| | 1 like | AA1659330 | TRIAE_CS42_U_TGACv1_{—} | |
| | | | 643846_AA2135420 | |
| Mfw3-D | Aborted | TRIAE_CS42_U_{—} | TRIAE_CS42_6AS_TGACv1_{—} | TraesCS6D02G246100 |
| | microspore | TGACv1_643846_{—} | 486918_AA1566480; | |
| | 1 like | AA2135420 | TRIAE_CS42_6BS_TGACv1_{—} | |
| | | | 514404_AA1659330 | |
| Mfw9-B | member of | TRIAE_CS42_2DS_{—} | TRIAE_CS42_2AS_TGACv1_{—} | TraesCS2B02G055800; |
| | the sweet | TGACv1_177708_{—} | 113352_AA0354890; | TraesCS2B02G055900: |
| | family | AA0582810 | TRIAE_CS42_2BS_TGACv1_{—} | TraesCS2B02G056100 |
| | | | 149844_AA0497680 | |
| Mfw10-A | member of | TRIAE_CS42_7AS_{—} | TRIAE_CS42_7BS_TGACv1_{—} | TraesCS7A02G261100 |
| | the sweet | TGACv1_570345_{—} | 591914_AA1925470 | |
| | family | AA1834200 | | |
| Mfw11-B | Similar to | TRIAE_CS42_U_{—} | no strong hit | TraesCS5B02G288600 |
| | OsSweet7e | TGACv1_640821_{—} | | |
| | | AA2075730 | | |
| Mfw12-D | Sweet4 | TRIAE_CS42_1DL_{—} | TRIAE_CS42_1AL_TGACv1_{—} | TraesCS1D02G365200 |
| | | TGACv1_065128_{—} | 002319_AA0040790; | |
| | | AA0236610 | TRIAE_CS42_1BL_TGACv1_{—} | |
| | | | 030610_AA0095680 | |
| Ms8 | | | | See Wu et al. Plant |
| | | | | Biotechnology Journal |
| | | | | 14: 1046-1054 (2015) |
| Ms32 | | | | See Wu et al. Plant |
| | | | | Biotechnology Journal |
| | | | | 14: 1046-1054 (2015) |
| Ocl14 | | | | See Wu et al. Plant |
| | | | | Biotechnology Journal |
| | | | | 14: 1046-1054 (2015) |
| Mac1 | | | | See Wu et al. Plant |
| | | | | Biotechnology Journal |
| | | | | 14: 1046-1054 (2015) |
| Ms22 | | | | See Wu et al. Plant |
| | | | | Biotechnology Journal |
| | | | | 14: 1046-1054 (2015) |
| Ms23 | | | | See Wu et al. Plant |
| | | | | Biotechnology Journal |
| | | | | 14: 1046-1054 (2015) |
| Mfw5-A | bHLH91 | TRIAE_CS42_2AL_{—} | TRIAE_CS42_2BL_TGACV1_{—} | TraesCS2A02G442700 |
| | | TGACv1_094707_{—} | 129925_AA0399500; | |
| | | AA0301850 | TRIAE_CS42_2DL_TGACv1_{—} | |
| | | | 158620_AA0523420 | |
| Mfw5-B | bHLH91 | TRIAE_CS42_2BL_{—} | TRIAE_CS42_2AL_TGACv1_{—} | TraesCS2B02G463800 |
| | | TGACv1_129925_{—} | 094707_AA0301850; | |
| | | AA0399500 | TRIAE_CS42_2DL_TGACv1_{—} | |
| | | | 158620_AA0523420 | |
| Mfw5-D | bHLH91 | TRIAE_CS42_2DL_{—} | TRIAE_CS42_2AL_TGACv1_{—} | TraesCS2D02G441800 |
| | | TGACv1_158620_{—} | 094707_AA0301850; | |
| | | AA0523420 | TRIAE_CS42_2BL_TGACv1_{—} | |
| | | | 129925_AA0399500 | |
| Mfw6-A | GAMYB | TRIAE_CS42_6AS_{—} | TRIAE_CS42_6DS_TGACv1_{—} | TraesCS6A02G137800 |
| | (AtMYB101) | TGACv1_485682_{—} | 543879_AA1744870 | |
| | | AA1550030 | | |
| ″ | GAMYB | TRIAE_CS42_6AS_{—} | TRIAE_CS42_6DS_TGACv1_{—} | |
| | (AtMYB101) | TGACv1_485682_{—} | 543879_AA1744870 | |
| | | AA1550030 | | |
| Mfw6-D | GAMYB | TRIAE_CS42_6DS_{—} | TRIAE_CS42_6AS_TGACV1_{—} | TraesCS6D02G126900 |
| | (AtMYB101) | TGACv1_543879_{—} | 485682_AA1550030 | |
| | | AA1744870 | | |
| ″ | GAMYB | TRIAE_CS42_6DS_{—} | TRIAE_CS42_6AS_TGACV1_{—} | |
| | (AtMYB101) | TGACv1_543879_{—} | 485682_AA1550030 | |
| | | AA1744870 | | |
| Mfw7-B | Hothead | TRIAE_CS42_4BL_{—} | TRIAE_CS42_4DL_TGACv1_{—} | TraesCS5A02G522000 |
| | | TGACv1_320326_{—} | 343496_AA1135340; | |
| | | AA1035360 | TRIAE_CS42_5AL_TGACv1_{—} | |
| | | | 375593_AA1224180 | |
| ″ | ″ | TRIAE_CS42_4BL_{—} | TRIAE_CS42_4DL_TGACv1_{—} | |
| | | TGACv1_320326_{—} | 343496_AA1135340; | |
| | | AA1035360 | TRIAE_CS42_5AL_TGACv1_{—} | |
| | | | 375593_AA1224180 | |
| Mfw7-D | Hothead | TRIAE_CS42_4DL_{—} | TRIAE_CS42_4BL_TGACv1_{—} | TraesCS4B02G353200 |
| | | TGACv1_343496_{—} | 320326_AA1035360; | |
| | | AA1135340 | TRIAE_CS42_5AL_TGACv1_{—} | |
| | | | 375593_AA1224180 | |
| Mfw8-D | Hothead | TRIAE_CS42_6DL_{—} | TRIAE_CS42_6AL_TGACv1_{—} | TraesCS6D02G238700 |
| | | TGACv1_527115_{—} | 470984_AA1500160; | |
| | | AA1698830 | TRIAE_CS42_6BL_TGACv1_{—} | |
| | | | 500863_AA1610910 | |
| Mfw13-D | Hothead | TRIAE_CS42_1DL_{—} | TRIAE_CS42_1AL_TGACv1_{—} | TraesCS1D02G189200 |
| | | TGACv1_063432_{—} | 001690_AA0034080; | |
| | | AA0227210 | TRIAE_CS42_1BL_TGACV1_{—} | |
| | | | 032570_AA0131570 | |
| Ms1 | | | | SEQ ID NOs: 183-191, |
| | | | | 214-216 |
| | | | | See also Tucker et al. |
| | | | | Nature Communications |
| | | | | 2017 8: 869; which is |
| | | | | incorporated by |
| | | | | reference herein in |
| | | | | its entirety |
| MSCA1 | | | | See U.S. Pat. No. |
| | | | | 7,919,676 and WO |
| | | | | 2019/043082; each of |
| | | | | which is incorporated |
| | | | | by reference herein |
| | | | | in its entirety. |
| | | | | For example, the nucleic |
| | | | | acid sequence of SEQ |
| | | | | ID NO: 16 and the |
| | | | | polypeptide sequence of |
| | | | | SEQ ID NO: 17 of U.S. |
| | | | | Pat. No. 7,919,676 |

[0148] In some embodiments of any of the aspects, the MF gene is Mfw2. Genomic, coding, and polypeptide sequences for the three homoeologues of Mfw2 occurring in the Triticum aestivum variety “Fielder” genome are provided herein as SEQ ID Nos. 4-6, 10-12, 14, 16, 18, and/or 21. A Mfw2 gene or sequence can be a naturally-occurring Mfw2 gene or sequence occurring in a plant, e.g., wheat. In some embodiments of any of the aspects, a MF gene can be the gene from a species, cultivar, or variety which has the highest degree of homology and/or sequence identity of the genes in that species', cultivar's or variety's genome with an Mfw2 sequence provided herein.

[0149] In some embodiments of any of the aspects, a functional allele of a MF gene shares at least 80% sequence identity with at least one of SEQ ID NOs: 4-6, 10-12, 14, 16, 18, and/or 21. In some embodiments of any of the aspects, a functional allele of a MF gene displays the same type of activity and shares at least 80% sequence identity with at least one of SEQ ID NOs: 4-6, 10-12, 14, 16, 18, and/or 21. In some embodiments of any of the aspects, a functional allele of a MF gene shares at least 80%, at least 85%, at least 90%, at least 95%, at least 98%, or greater sequence identity with at least one of SEQ ID NOs: 4-6, 10-12, 14, 16, 18, and/or 21. In some embodiments of any of the aspects, a functional allele of a MF gene displays the same type of activity and shares at least 80%, at least 85%, at least 90%, at least 95%, at least 98%, or greater sequence identity with at least one of SEQ ID NOs: 4-6, 10-12, 14, 16, 18, and/or 21. In some embodiments of any of the aspects, a functional allele of a MF gene shares at least 95% sequence identity with at least one of SEQ ID NOs: 4-6, 10-12, 14, 16, 18, and/or 21. In some embodiments of any of the aspects a functional allele of a MF gene displays the same type of activity and shares at least 95% sequence identity with at least one of SEQ ID NOs: 4-6, 10-12, 14, 16, 18, and/or 21. In some embodiments of any of the aspects, the functional allele of a MF gene is one of SEQ ID NOs: 4-6, 10-12, 14, 16, 18, and/or 21.

[0150] In some embodiments of any of the aspects, the MF gene is Ms1. Although Ms1 expresses a protein which is vital for development of an independent haploid pollen grain/sperm cell through to its successful germination on and penetration of a stigma and finally fertilization of an ovule, it is expressed in the diploid phase before haploid phase microgametogenesis. Ms1 is understood to be expressed in microsporocytes and secondary sporogenous cells but not in pollen grains during microgametogeneis. Additionally, a single copy of Ms1 is sufficient to resuce an Ms1 knockout. For characterization and further information regarding Ms1, see Wang et al. PNAS 2017 114 (47) 12614-12619; which is incorporated by reference herein in its entirety. Genomic, coding, and polypeptide sequences for the three homologues of Ms1 occurring in the Chinese Spring genome are provided herein as SEQ ID Nos. 183-191 and SEQ ID NOs: 214-216 (B genome). A Ms1 gene or sequence can be a naturally-occurring Ms1 gene or sequence occurring in a plant, e.g., wheat. In some embodiments of any of the aspects, a Ms1 gene can be the gene from a species, cultivar, or variety which has the highest degree of homology and/or sequence identity of the genes in that species', cultivar's or variety's genome with an Ms1 sequence provided herein.

[0151] In some embodiments of any of the aspects, the MF gene shares at least 80% sequence identity with Ms1. In some embodiments of any of the aspects, the MF gene displays the same type of activity and shares at least 80% sequence identity with Ms1. In some embodiments of any of the aspects, the MF gene shares at least 80%, at least 85%, at least 90%, at least 95%, at least 98%, or greater sequence identity with Ms1. In some embodiments of any of the aspects, the MF gene displays the same type of activity and shares at least 80%, at least 85%, at least 90%, at least 95%, at least 98%, or greater sequence identity with Ms1. In some embodiments of any of the aspects, the MF gene shares at least 95% sequence identity with Ms1. In some embodiments of any of the aspects, the MF gene displays the same type of activity and shares at least 95% sequence identity with Ms1. In some embodiments of any of the aspects, the MF gene is Ms1.

[0152] In the first genome, the first chromosome can be engineered to comprise a functional allele(s) of a MF gene at the MF loci and at least one allele of a seed color gene (e.g., seed coat and/or seed endosperm gene) (or at least one functional ectopic allele of each member of a set of seed color genes) by at least two different methods. In a first method, the endogenous wild-type functional allele of the MF gene is not engineered or modified, and the seed color gene (e.g., seed coat and/or seed endosperm gene) (or at least one functional ectopic allele of each member of a set of seed color genes) is inserted and/or introgressed into the chromosome, e.g., at the MF locus. Accordingly, in some embodiments of any of the aspects, the at least one functional allele of a MF gene is the endogenous wild-type functional allele of the MF gene.

[0153] In a second method, the endogenous allele of the MF gene is engineered to a loss-of-function MF allele and then a functional allele(s) of the MF gene is inserted and/or introgressed, e.g., as part of a single construct that includes the seed color gene (e.g., seed coat and/or seed endosperm gene) (or at least one functional ectopic allele of each member of a set of seed color genes). Accordingly, in some embodiments of any of the aspects, the at least one functional allele of a MF gene is an ectopic copy of the MF gene. In some embodiments of any of the aspects, the at least one functional allele of a MF gene and the at least one allele of a seed color gene (or at least one allele of each of a set of seed color genes) (e.g., seed coat and/or seed endosperm gene) are part of single construct.

[0154] In some embodiments of any of the aspects, a male-sterile line may comprise the recited modifications/alleles of two or more MF genes, e.g., due to redundancy and/or leaky phenotypes. In such embodiments, the maintainer line will comprise the same arrangement of MF alleles described herein, but for both MF genes.

[0155] As used herein, “PV” or “pollen vital” gene is a gene which, when its expression is inhibited, decreases the rate and/or success of pollen development and which functions post-meiosis, e.g, including the haploid phases towards the end of meiosis. In some embodiments of any of the aspects, a PV gene, when fully deactivated in a plant, is sufficient to eliminate development and/or germination of mature pollen and/or pollen-tube extension/ovule fertilisation, e.g., the PV gene is strictly necessary for pollen development. PV genes for various species have been described in the art, and exemplary, but non-limiting PV genes include those described in Golovkin and Redd et al PNAS 100(18) 10558-10563 (2003), as well as the Ms genes (e.g., Ms26 and Ms45) described in Wang et al. PNAS 2017; Singh et al. PloS One 12(5) e0177632 (2017); Timofejva et al. G3: Genes-Genomes-Genetc 3:231-249 (2013); and Wu et al. Plant Biotechnology Journal 14:1046-1054 (2015); each of which is incorporated by reference herein in its entirety. In some embodiments of any of the aspects, the PV gene is a gene which has been identified to produce a pollen-death phenotype when a plant was modified to a knock-out for that gene.

[0156] The PV gene selected for use in the compositions and methods described herein can, e.g., have homology to a gene demonstrated to be vital for post-meiosis events such as pollen-grain development, germination, or pollen tube extension in a plant. A non-limiting list of exemplary PV genes is provided in Table 2. In some embodiments of any of the aspects, the PV gene is a gene selected from Table 2. In some embodiments of any of the aspects, the PV gene is a gene which displays the same type of activity, and/or shares at least 80%, at least 85%, at least 90%, at least 95%, at least 98%, or greater sequence identity with a PV gene of Table 2. In some embodiments of any of the aspects, a PV gene can be the gene from a species, cultivar, or variety which has the highest degree of homology and/or sequence identity of the genes in that species', cultivar's or variety's genome with a gene selected from Table 2.

[0157] In some embodiments of any of the aspects, a functional allele of a PV gene shares at least 80% sequence identity with at least one sequence of Table 2. In some embodiments of any of the aspects, a functional allele of a PV gene displays the same type of activity and shares at least 80% sequence identity with at least one sequence of Table 2. In some embodiments of any of the aspects, a functional allele of a PV gene shares at least 80%, at least 85%, at least 90%, at least 95%, at least 98%, or greater sequence identity with at least one sequence of Table 2. In some embodiments of any of the aspects, a functional allele of a PV gene displays the same type of activity and shares at least 80%, at least 85%, at least 90%, at least 95%, at least 98%, or greater sequence identity with at least one sequence of Table 2. In some embodiments of any of the aspects, a functional allele of a PV gene shares at least 95% sequence identity with at least one sequence of Table 2. In some embodiments of any of the aspects a functional allele of a PV gene displays the same type of activity and shares at least 95% sequence identity with at least one sequence of Table 2. In some embodiments of any of the aspects, the functional allele of a PV gene is a sequence of Table 2.

TABLE 2
Exemplary PV genes

| | | | TGAC v1 homoeologues* - | |
|---|---|---|---|---|
| | | | the copies on the other | |
| Assigned | | | subgenomes of wheat and | |
| Mfw | | TGAC v1 gene | their associated gene | RefSeq v1.1 |
| name | Blast hit | model* | models | Sequences |
| Mfw1-A | RPG1 | TRIAE_CS42_7AL_{—} | TRIAE_CS42_7BL_TGACV1_{—} | TraesCS7A02G533900 |
| | (RUPTURED | TGACv1_556969_{—} | 580455_AA1914070; | |
| | POLLEN | AA1774370 | TRIAE_CS42_7DL_TGACv1_{—} | |
| | GRAIN1) | | 603435_AA1983700 | |
| | like | | | |
| Mfw1-B | RPG1 | TRIAE_CS42_7BL_{—} | TRIAE_CS42_7AL_TGACv1_{—} | TraesCS7B02G451200 |
| | (RUPTURED | TGACv1_580455_{—} | 556969_AA1774370; | |
| | POLLEN | AA1914070 | TRIAE_CS42_7DL_TGACv1_{—} | |
| | GRAIN1) | | 603435_AA1983700 | |
| | like | | | |
| Mfw1-D | RPG1 | TRIAE_CS42_7DL_{—} | TRIAE_CS42_7AL_TGACv1_{—} | TraesCS7D02G521400 |
| | (RUPTURED | TGACv1_603435_{—} | 556969_AA1774370; | |
| | POLLEN | AA1983700 | TRIAE_CS42_7BL_TGACV1_{—} | |
| | GRAIN1) | | 580455_AA1914070 | |
| | like | | | |
| Mfw4-D | RPG1 | TRIAE_CS42_5BS_{—} | TRIAE_CS42_5AS_TGACv1_{—} | |
| | (RUPTURED | TGACv1_423307_{—} | 393366_AA1271880; | |
| | POLLEN | AA1373980; | TRIAE_CS42_5DS_TGACV1_{—} | |
| | GRAIN1) | | 457788_AA1489840 | |
| | like | | | |
| Ms26 | | TRIAE_CS42_4AS_{—} | | SEQ ID Nos: 192-200 |
| | | TGACv1_308399_{—} | | |
| | | AA1027760 | | |
| | | TRIAE_CS42_4BL_{—} | | |
| | | TGACv1_321123_{—} | | |
| | | AA1055760 | | |
| | | TRIAE_CS42_4DL_{—} | | |
| | | TGACv1_345634_{—} | | |
| | | AA1154040 | | |
| Ms45 | | TRIAE_CS42_4AS_{—} | | SEQ ID Nos: 201-209 |
| | | TGACv1_307709_{—} | | |
| | | AA1022920 | | |
| | | TRIAE_CS42_4BL_{—} | | |
| | | TGACv1_320775_{—} | | |
| | | AA1048430 | | |
| | | TRIAE_CS42_4DL_{—} | | |
| | | TGACv1_343561_{—} | | |
| | | AA1136570 | | |
| RPG1 | | | | NC_003076.8 |
| PV1 | | | | SEQ ID NOs: 174-182 |
| (NPG1) | | | | See also Golovkin, M. |
| | | | | PNAS. (2003) 100, |
| | | | | 10558-1056; which |
| | | | | is incorporated by |
| | | | | reference herein in |
| | | | | its entirety |
| Apv1 | | | | See, e.g., Wu et al. |
| | | | | Plant Biotechnology |
| | | | | Journal 14: 1046-1054 |
| | | | | (2015); which is |
| | | | | incorporated by |
| | | | | reference herein in |
| | | | | its entirety |
| Ipe1 | | | | See, e.g., Wu et al. |
| | | | | Plant Biotechnology |
| | | | | Journal 14: 1046-1054 |
| | | | | (2015); which is |
| | | | | incorporated by |
| | | | | reference herein in |
| | | | | its entirety |
| PV2 | | | | TraesCS4A02G001100 |
| (ANX1) | | | | TraesCS4B02G002300 |
| | | | | TraesCS4D02G001000 |
| PV3 | | | | TraesCS4A02G441600.1 |
| (RUP0) | | | | TraesCS7A02G055000.1 |
| | | | | TraesCS7D02G050100.1 |
| | | | | SEQ ID NOs: 222-230 |
| | | | | and 257 |
| | | | | See also Yang et al. |
| | | | | Joural of Experimental |
| | | | | Botany 2020 71: 2112- |
| | | | | 26; which is |
| | | | | incorporated by |
| | | | | reference herein in |
| | | | | its entirety. |

[0158] In some embodiments of any of the aspects, the PV gene is PV1, or pollen-grain-vital gene 1. PV1 expresses a protein which is vital for development of an independent haploid pollen grain/sperm cell through to its successful germination on and penetration of a stigma and finally fertilization of an ovule. PV1 is understood to be expressed in microsporocytes and secondary sporogenous cells. See, e.g., Golovkin, M. PNAS. (2003) 100, 10558-1056; which is incorporated by reference herein in its entirety. Additionally, a single copy of PV1 is sufficient to rescue an PV1 knockout. Genomic, coding, and polypeptide sequences for the three homoeologues' pairs of PV1 occurring in the Chinese Spring genome are provided herein as SEQ ID Nos. 174-182. A PV1 gene or sequence can be a naturally-occurring PV1 gene or sequence occurring in a plant, e.g., wheat. In some embodiments of any of the aspects, a PV1 gene can be the gene from a species, cultivar, or variety which has the highest degree of homology and/or sequence identity of the genes in that species', cultivar's or variety's genome with an PV1 sequence provided herein.

[0159] In some embodiments of any of the aspects, the PV gene shares at least 80% sequence identity with PV1. In some embodiments of any of the aspects, the PV gene displays the same type of activity and shares at least 80% sequence identity with PV1. In some embodiments of any of the aspects, the PV gene shares at least 80%, at least 85%, at least 90%, at least 95%, at least 97%, at least 98%, or greater sequence identity with PV1. In some embodiments of any of the aspects, the PV gene displays the same type of activity and shares at least 80%, at least 85%, at least 90%, at least 95%, at least 97%, at least 98%, or greater sequence identity with PV1. In some embodiments of any of the aspects, the PV gene shares at least 95% sequence identity with PV1. In some embodiments of any of the aspects, the PV gene displays the same type of activity and shares at least 95% sequence identity with PV1. In some embodiments of any of the aspects, the PV gene is PV1.

[0160] In some embodiments of any of the aspects, a functional allele of a PV gene shares at least 80% sequence identity with at least one of SEQ ID NOs: 1, 3, 4, 6, 7, and 9, or encodes a polypeptide with at least 80% sequence identity with at least one of SEQ ID NOs: 2, 5, and 8. In some embodiments of any of the aspects, a functional allele of a PV gene displays the same type of activity and shares at least 80% sequence identity with at least one of SEQ ID NOs: 1, 3, 4, 6, 7, and 9, or encodes a polypeptide with at least 80% sequence identity with at least one of SEQ ID NOs: 2, 5, and 8. In some embodiments of any of the aspects, a functional allele of a PV gene shares at least 80%, at least 85%, at least 90%, at least 95%, at least 97%, at least 98%, or greater sequence identity with at least one of SEQ ID NOs: 1, 3, 4, 6, 7, and 9, or encodes a polypeptide with at least 80% sequence identity with at least one of SEQ ID NOs: 2, 5, and 8. In some embodiments of any of the aspects, a functional allele of a PV gene displays the same type of activity and shares at least 80%, at least 85%, at least 90%, at least 95%, at least 97%, at least 98%, or greater sequence identity with at least one of SEQ ID NOs: 1, 3, 4, 6, 7, and 9, or encodes a polypeptide with at least 80% sequence identity with at least one of SEQ ID NOs: 2, 5, and 8. In some embodiments of any of the aspects, a functional allele of a PV gene shares at least 95% sequence identity with at least one of SEQ ID NOs: 1, 3, 4, 6, 7, and 9, or encodes a polypeptide with at least 80% sequence identity with at least one of SEQ ID NOs: 2, 5, and 8. In some embodiments of any of the aspects a functional allele of a PV gene displays the same type of activity and shares at least 95% sequence identity with at least one of SEQ ID NOs: 1, 3, 4, 6, 7, and 9, or encodes a polypeptide with at least 80% sequence identity with at least one of SEQ ID NOs: 2, 5, and 8. In some embodiments of any of the aspects, the functional allele of a PV gene is one of SEQ ID NOs: 1, 3, 4, 6, 7, and 9, or encodes a polypeptide of one of SEQ ID NOs: 2, 5, and 8.

[0161] In some embodiments of any of the aspects, the PV gene is PV2, or pollen-grain-vital gene 2. For further discussion of the activity and characterization of P2(ANX1) see, e.g., Boisson-Dernier A et al. Development (2009) 136:3279-3288; and Miyazaki S, eta 1. Curr Biol (2009) 19:1327-1331, each of which is incorporated by reference herein in its entirety. Genomic, coding, and polypeptide sequences for the three homologues of PV2 occurring in the Chinese Spring genome are provided herein as SEQ ID Nos. 157-165. A PV2 gene or sequence can be a naturally-occurring PV2 gene or sequence occurring in a plant, e.g., wheat. In some embodiments of any of the aspects, a PV2 gene can be the gene from a species, cultivar, or variety which has the highest degree of homology and/or sequence identity of the genes in that species', cultivar's or variety's genome with an PV2 sequence provided herein.

[0162] In some embodiments of any of the aspects, the PV gene shares at least 80% sequence identity with PV2. In some embodiments of any of the aspects, the PV gene displays the same type of activity and shares at least 80% sequence identity with PV2. In some embodiments of any of the aspects, the PV gene shares at least 80%, at least 85%, at least 90%, at least 95%, at least 98%, or greater sequence identity with PV2. In some embodiments of any of the aspects, the PV gene displays the same type of activity and shares at least 80%, at least 85%, at least 90%, at least 95%, at least 98%, or greater sequence identity with PV2. In some embodiments of any of the aspects, the PV gene shares at least 95% sequence identity with PV2. In some embodiments of any of the aspects, the PV gene displays the same type of activity and shares at least 95% sequence identity with PV2. In some embodiments of any of the aspects, the PV gene is PV2.

[0163] In some embodiments of any of the aspects, a functional allele of a PV gene shares at least 80% sequence identity with at least one of SEQ ID NOs: 157, 158, 160, 161, 163, and 164, or encodes a polypeptide with at least 80% sequence identity with at least one of SEQ ID NOs: 159, 162, or 165. In some embodiments of any of the aspects, a functional allele of a PV gene displays the same type of activity and shares at least 80% sequence identity with at least one of SEQ ID NOs: 157, 158, 160, 161, 163, and 164, or encodes a polypeptide with at least 80% sequence identity with at least one of SEQ ID NOs: 159, 162 and 165. In some embodiments of any of the aspects, a functional allele of a PV gene shares at least 80%, at least 85%, at least 90%, at least 95%, at least 98%, or greater sequence identity with at least one of SEQ ID NOs: 157, 158, 160, 161, 163, and 164, or encodes a polypeptide with at least 80% sequence identity with at least one of SEQ ID NOs: 159, 162, and 165. In some embodiments of any of the aspects, a functional allele of a PV gene displays the same type of activity and shares at least 80%, at least 85%, at least 90%, at least 95%, at least 98%, or greater sequence identity with at least one of SEQ ID NOs: 157, 158, 160, 161, 163, and 164, or encodes a polypeptide with at least 80% sequence identity with at least one of SEQ ID NOs: 159, 162, and 165. In some embodiments of any of the aspects, a functional allele of a PV gene shares at least 95% sequence identity with at least one of SEQ ID NOs: 157, 158, 160, 161, 163, and 164, or encodes a polypeptide with at least 80% sequence identity with at least one of SEQ ID NOs 159, 162, and 165. In some embodiments of any of the aspects a functional allele of a PV gene displays the same type of activity and shares at least 95% sequence identity with at least one of SEQ ID NOs: 157, 158, 160, 161, 163, and 164, or encodes a polypeptide with at least 80% sequence identity with at least one of SEQ ID NOs: 159, 162, and 165. In some embodiments of any of the aspects, the functional allele of a PV gene is one of SEQ ID NOs: 157, 158, 160, 161, 163, and 164, or encodes a polypeptide of one of SEQ ID NOs: 159, 162, and 165.

[0164] In some embodiments of any of the aspects, the PV gene is Pollen Vital 3 (PV3) or RUPO, or Ruptured Pollen Tube. For further discussion of the activity and characterization of PV3 (RUPO) see, e.g., Liu LPLoS Genet 2016 12(7): e1006085, which is incorporated by reference herein in its entirety. Genomic, coding, and polypeptide sequences for the three homoeologues' pairs of PV3 are provided herein as SEQ ID Nos. 222-230. A PV3 gene or sequence can be a naturally-occurring PV3 gene or sequence occurring in a plant, e.g., wheat. In some embodiments of any of the aspects, a PV3 gene can be the gene from a species, cultivar, or variety which has the highest degree of homology and/or sequence identity of the genes in that species', cultivar's or variety's genome with an PV3 sequence provided herein.

[0165] In some embodiments of any of the aspects, the PV gene shares at least 80% sequence identity with PV3. In some embodiments of any of the aspects, the PV gene displays the same type of activity and shares at least 80% sequence identity with PV3. In some embodiments of any of the aspects, the PV gene shares at least 80%, at least 85%, at least 90%, at least 95%, at least 97%, at least 98%, or greater sequence identity with PV3. In some embodiments of any of the aspects, the PV gene displays the same type of activity and shares at least 80%, at least 85%, at least 90%, at least 95%, at least 97%, at least 98%, or greater sequence identity with PV3. In some embodiments of any of the aspects, the PV gene shares at least 95% sequence identity with PV3. In some embodiments of any of the aspects, the PV gene displays the same type of activity and shares at least 95% sequence identity with PV3. In some embodiments of any of the aspects, the PV gene is PV3.

[0166] In some embodiments of any of the aspects, a functional allele of a PV gene shares at least 80% sequence identity with at least one of SEQ ID NOs: 222, 224, 225, 227, 228, 230, and 257 or encodes a polypeptide with at least 80% sequence identity with at least one of SEQ ID NOs: 223, 226, and 229. In some embodiments of any of the aspects, a functional allele of a PV gene displays the same type of activity and shares at least 80% sequence identity with at least one of SEQ ID NOs: 222, 224, 225, 227, 228, 230, and 257 or encodes a polypeptide with at least 80% sequence identity with at least one of SEQ ID NOs: 223, 226, and 229. In some embodiments of any of the aspects, a functional allele of a PV gene shares at least 80%, at least 85%, at least 90%, at least 95%, at least 97%, at least 98%, or greater sequence identity with at least one of SEQ ID NOs: 222, 224, 225, 227, 228, 230, and 257 or encodes a polypeptide with at least 80% sequence identity with at least one of SEQ ID NOs: 223, 226, and 229. In some embodiments of any of the aspects, a functional allele of a PV gene displays the same type of activity and shares at least 80%, at least 85%, at least 90%, at least 95%, at least 97%, at least 98%, or greater sequence identity with at least one of SEQ ID NOs: 222, 224, 225, 227, 228, 230, and 257 or encodes a polypeptide with at least 80% sequence identity with at least one of SEQ ID NOs: 223, 226, and 229. In some embodiments of any of the aspects, a functional allele of a PV gene shares at least 95% sequence identity with at least one of SEQ ID NOs: 222, 224, 225, 227, 228, 230, and 257 or encodes a polypeptide with at least 80% sequence identity with at least one of SEQ ID NOs: 223, 226, and 229. In some embodiments of any of the aspects a functional allele of a PV gene displays the same type of activity and shares at least 95% sequence identity with at least one of SEQ ID NOs: 222, 224, 225, 227, 228, 230, and 257 or encodes a polypeptide with at least 80% sequence identity with at least one of SEQ ID NOs: 223, 226, and 229. In some embodiments of any of the aspects, the functional allele of a PV gene is one of SEQ ID NOs: 222, 224, 225, 227, 228, 230, and 257 or encodes a polypeptide of one of SEQ ID NOs: 223, 226, and 229.

[0167] In some embodiments of any of the aspects, the endogenous MF and PV genes are located on the same arms of the same homologous pair of chromosomes in the wild-type genome.

[0168] A seed color gene is a gene or allele that, when at least one copy is present in the genome, will cause some or all of the tissue of the seed of the plant to have a different color than in the absence of the at least one copy of that gene or allele. In some embodiments of any of the aspects, the tissue is the seed coat. In some embodiments of any of the aspects, the tissue is the endosperm. In some embodiments of any of the aspects, the seed color gene is a seed color gene (e.g., seed coat and/or seed endosperm gene). A seed endosperm color gene is a gene or allele that, when at least one dominant expressed copy is present in the genome, will cause the endosperm of the seed of the plant to have a different color than in the absence of the at least one dominant copy of that gene or allele. The genome of an endosperm comprises two copies of the maternal genome (ie from the ovule) and only one from the paternal parent (ie the sperm cell). So embryos from, e.g., a heterozygous (MFW′:BA/PV′ maintainer as described herein will have either two copies of BA:MFW′ or two copies of PV′. With no BA allele from the sperm cell, in the maintainer described herein, seeds from the former will have a different (BA darker/blue) color seed and the latter (PV′) will have wildtype seed color; hence the two genotypes can be color-sorted with an optical sorter—a particular benefit for the production of the maintainer and male-sterile in the hybrid system described herein. The color can be in the visible or non-visible spectrum. Different color refers to a distinguishable difference in color, either by the human eye or a machine. The difference can be a difference in saturation, lightness, darkness, color, or hue. The color can be due to production of a pigment or any other change that impacts the light absorption, reflection, or refraction of the seed. In some embodiments of any of the aspects, a set of seed color genes, e.g, two or more different genes, are required to express the different color. In such embodiments, where ever a singular seed color gene or allele is referenced, embodiments comprising a set of seed color genes or a set of seed color gene alleles is specifically contemplated. In some embodiments, the plants, chromosomes, and/or cassettes described herein can comprise a set of seed color genes (or at least one allele of each member of a seed color gene set) in place of a singlular seed color gene or allele thereof. Suitable seed color genes (e.g., seed coat and/or seed endosperm gene) are known in the art and include, by way of non-limiting example, blue aleurone (BA) or deep-red (DsRed). Sequences for these seed color gene (e.g., seed coat and/or seed endosperm gene)s are known in the art, e.g., BA sequences are described in US Patent Publication US2020/0255856; Zheng et al. Euphytica 2006 152:51-60; Zeller et al. Theor Appl Genet. 19991 81:551-558; Li et al. PLoS One 2017 12:e0181116 (see, e.g, SEQ ID NO: 155); Zong et al. Plant Cell Rep 2019 38:1291-8; each of which is incorporated by reference herein in its entirety. As a further illustrative example, HvMYC2 is a suitable seed color gene in barley and is described in the art, e.g., at Strygina et al. BMC Plant Biology 2017 17:184, which is incorporated by reference herein in its entirety.

[0169] The BA gene's grain phenotype has been shown to be dose-related, but one allele's expression is enough for a darker-grained phenotype to be colour-selectable. In fact in the maintainer's endosperm there will be two alleles from the maternal side with BA and one from the paternal without it, providing double the amount of BA alleles needed for functional colour-sorting. In some embodiments of any of the aspects, the blue aleurone gene comprises, consists of, or consists essentially of a sequence of SEQ ID NO: 155. In some embodiments of any of the aspects, the blue aleurone gene comprises, consists of, or consists essentially of a sequence having at least 60%, at least 65%, at least 70%, at least 75%, at least 80%, at least 90%, at least 95%, or at least 98% sequence identity with SEQ ID NO: 155. In some embodiments of any of the aspects, the blue aleurone gene comprises, consists of, or consists essentially of a sequence having at least 60%, at least 65%, at least 70%, at least 75%, at least 80%, at least 90%, at least 95%, or at least 98% sequence identity with SEQ ID NO: 155 and which retains the wild-type activity of SEQ ID NO: 155 (e.g., causing blue seed endosperm color). In some embodiments of any of the aspects, the blue aleurone gene comprises, consists of, or consists essentially of a sequence having at least 90% sequence identity with SEQ ID NO: 155 and which retains the wild-type activity of SEQ ID NO: 155 (e.g., causing blue seed endosperm color). In some embodiments of any of the aspects, the blue aleurone gene comprises, consists of, or consists essentially of a sequence having at least 95% sequence identity with SEQ ID NO: 155 and which retains the wild-type activity of SEQ ID NO: 155 (e.g., causing blue seed endosperm color).

SEQ ID NO: 155
atgcgggaaatagctactcagcggtgtggtaatcgatcaatggcgctatcagctcctccc
agtcaggaacagccgtcggggaagcaattcggctaccagctcgctgctgctgtgaggagc
atcaactggacttatggcatattttggtccatttccgccagcccgcgcccaggccactcc
tcagttctggcgtggaaggatgggttctacaacggcgagataaagactagaaagattacc
ggctcgaccactacggagcttacagcggacgagcgcgtcatgcacagaagcaagcaactg
agggagctctacgaatcgctcttgcccggcaactccaacaaccgggcaaggcgaccaacc
gcctcactgtcaccggaggatctcggggacggcgagtggtattacaccataagcatgact
tacaccttccaccctaatcaagggttgccaggcaaaagctttgcgagcaatcaacatgtt
tggctgtacaacgctcaatacgcaaacaccagagttttcccccgcgcgctcttagcaaag
acaatcgtttgcattcccttcatgggcggtgtgcttgagctcggaacgtcggatcaggtg
ttggaggacccgagcatggtgaagcggatcagcacgtctttctgggagctgcacttgccg
tcatccttggagtcgaaggatccgagctccagcacatcagcaaacgataccagggaggcc
accgacatcatcttgttcgaggatttcgaccacaacgacacagttgagggggtgatctct
gagcaaagggaggtccagtgcccgtccaacgtcaatctggagcgcctcacaaagcagatg
gacgagttccacagccttctcggtggactggacgtgcatcctctcgaagacagatggatc
atggacgagccctttgagtttacgttttccccagaagtggcgccggctatggatatgccg
agcaccgacgatgtcatcgtcactttaagtaggtccgaaggctctcgtccatcctgcttc
acagcgtggaagggatcatccgagtcgaaatacgtggctggccaggtcgttggggagtca
cagaagttgctgaataaagttgtggctggtggtgcatgggcgagcaattatggcggtcgc
accatggtgagagctcagggaattaacagcaacacccatgtcatgacagagagaagacgc
cgggagaaactcaacgagatgttcctggttctcaagtcactggtcccgtccattcacaag
gtagacaaagcatccatcctcacagaaacgataggttatcttagagaactgaagcaaagg
gtagatcagctagaatccagccggtcaccgtctcacccaaaagaaacaacaggaccgagc
agaagccatgtcgtcggcgctaggaagaagatagtctcggccggatccaagaggaaggcg
ccagggctggagagcccgagcaatgtcgtgaacgtgacgatgctggacaaggtggtgctg
ttggaggtgcagtgcccgtggaaggagctgctgatgacacaagtgtttgacgccatcaag
agcctctgtctggacgttgtctccgtgcaggcatccacatcaggtggccgtcttgacctc
aagatacgagctaatcagcagcttgcggtcggttctgctatggtggcacctggggcaatc
accgaaacacttcagaaagctatatag

[0170] In some embodiments of any of the aspects, the at least one seed color gene (e.g., seed coat and/or seed endosperm gene)/allele (or set of seed color genes/alleles) is a sequence from a different line or variety of the same species as the plant/cell. In some embodiments of any of the aspects, the at least one seed color gene (e.g., seed coat and/or seed endosperm gene) allele (or set of seed color genes/alleles) is a sequence from the same genus as the plant/cell. In some embodiments of any of the aspects, the at least one seed color gene (e.g., seed coat and/or seed endosperm gene) allele (or set of seed color genes/alleles) comprises, consists of, or consists essentially of a sequence from T. aestivum, T durum or T. monococcum, or another Triticum aestivum-crossable species. In some embodiments of any of the aspects, the at least one seed color gene (e.g., seed coat and/or seed endosperm gene) (or set of seed color genes/alleles) is exogenous, e.g., the gene is not present in the relevant genome(s) except for the functional copy(ies) of the seed color gene (e.g., seed coat and/or seed endosperm gene) (or set of seed color genes/alleles) prior to the engineered modifications described herein. In some embodiments of any of the aspects, the the at least one allele of a seed color gene (e.g., seed coat and/or seed endosperm gene) is at least two copies and/or individual alleles of the seed color gene (e.g., seed coat and/or seed endosperm gene) In some embodiments of any of the aspects, the the at least one allele of a seed color gene (e.g., seed coat and/or seed endosperm gene) is at least three copies and/or individual alleles of the seed color gene (e.g., seed coat and/or seed endosperm gene). In some embodiments of any of the aspects, the the at least one allele of a seed color gene (e.g., seed coat and/or seed endosperm gene) is at least four copies and/or individual alleles of the seed color gene (e.g., seed coat and/or seed endosperm gene).

[0171] An allele or gene described herein can comprise both a coding sequence and one or more regulatory sequences operably linked to the coding sequence. Regulatory sequences can include but are not limited to promoters, enhancers, boundary elements, insulators, 5′ untranslated (5′UTR) or “leader” sequences, 3′ UTR or “trailer” sequences, etc. In some embodiments of any of the aspects, the regulatory sequences of an ectopic gene or allele are the regulatory sequences which are endogenous to that gene or allele in its wild-type context, e.g., an ectopic gene includes a coding sequence and one or more of its native regulatory sequences. In some embodiments of any of the aspects, the regulatory sequences of an exogenous gene or allele are the regulatory sequences which are endogenous to that gene or allele in its wild-type context, e.g., an exogenous gene includes a coding sequence and one or more of its native regulatory sequences (which are also exogenous to the plant/cell). In some embodiments of any of the aspects, the regulatory sequences of an exogenous or ectopic gene or allele are regulatory sequences which are endogenous to the plant/cell. In some embodiments of any of the aspects, the regulatory sequences of an exogenous or ectopic gene or allele are regulatory sequences which are endogenous to the plant/cell but not native to the gene or allele.

[0172] In some embodiments of any of the aspects, one or more functional alleles can comprise cDNA constructs derived from wild-type or functional alleles of the relevant gene(s) (e.g., introns are not present). In some embodiments of any of the aspects, functional alleles can comprise endogenous promoters, enhancers, and/or terminators in the normal sense orientation. In some embodiments, a functional allele and/or seed color gene (e.g., seed coat and/or seed endosperm gene) (or set of seed color genes/alleles) expression can be driven by exogenous and/or heterologous promoters, enhancers, and/or terminators. Exemplary promoters include OsU3, TaU3, TaU6 and OsU6 promoters.

[0173] As described herein, a functional allele(s) of a MF gene at the MF gene locus and at least one allele of a seed color gene (e.g., seed coat and/or seed endosperm gene) (or set of seed color genes/alleles) are present on a first chromosome of a pair of homologous chromosomes. In some embodiments, the at least one functional allele of the MF gene and the seed color gene (e.g., seed coat and/or seed endosperm gene) (or set of seed color genes/alleles) are located within 10 centimorgans (cM) of each other, e.g., within 10 cM, within 5 cM, within 2 cM, within 1 cM, within 0.75 cM, within 0.5 cM, or within 0.25 cM. In some embodiments, the seed color gene (e.g., seed coat and/or seed endosperm gene) (or set of seed color genes/alleles) is located within 10 centimorgans (cM) of the MF gene locus, e.g., within 10 cM, within 5 cM, within 2 cM, within 1 cM, within 0.75 cM, within 0.5 cM, or within 0.25 cM.

[0174] As described herein, a loss-of-function allele of the MF gene and at least one ectopic functional allele of a PV gene are present on a second chromosome of a pair of homologous chromosomes. In some embodiments, the at least one functional allele of the PV gene and the loss-of-function allele of the MF gene are located within 10 centimorgans (cM) of each other, e.g., within 10 cM, within 5 cM, within 2 cM, within 1 cM, within 0.75 cM, within 0.5 cM, or within 0.25 cM. In some embodiments, the at least one functional allele of the PV gene is located within 10 centimorgans (cM) of the MF gene locus, e.g., within 10 cM, within 5 cM, within 2 cM, within 1 cM, within 0.75 cM, within 0.5 cM, or within 0.25 cM.

[0175] In some embodiments of any of the aspects, a maintainer plant described herein comprises multiple functional alleles and/or seed color gene (e.g., seed coat and/or seed endosperm gene alleles (or set of seed color genes/alleles), e.g., multiple copies of the same relevant gene, e.g., arranged in series. Multiple copies of a gene can increase the strength or penetrance of the relevant phenotype and may therefore be desired to avoid intermediate phenotypes or failure to express the phenotype dictated by the relevant genes. This is sometimes referred to in the art as “gene stacking.” Multiple copies of the genes described herein can be inserted into a genome by multiple sequential steps using any appropriate technology described herein or known in the art, or using technologies that permit insertion of large constructs. By way of non-limiting example, GAANTRY technology can transfer multiple genes into a genome via a single construct (see Collier et al. The Plant Journal 2018 95:573-583) and alternative technology to transfer cassettes of at least 37 kb and likely as much as 100 kb, into wheat is also known in the art (see Luo et al. Nature Biotechnology 2021 39:561-566 doi: 10.1038/s41587-020-00770-x). The foregoing references are incorporated by reference herein in their entireties.

[0176] In some embodiments of any of the aspects, the maintainer plant does not comprise any genetic sequences which are exogenous to that plant species except for the allele(s) of the seed color gene (e.g., seed coat and/or seed endosperm gene) (or set of seed color genes/alleles). In some embodiments of any of the aspects, the maintainer plant does not comprise any genetic sequences which are exogenous to that plant genus except for the allele(s) of the seed color gene (e.g., seed coat and/or seed endosperm gene) (or set of seed color genes/alleles). In some embodiments of any of the aspects, the maintainer plant does not comprise any genetic sequences which are ectopic to that plant species except for the allele(s) of the seed color gene (e.g., seed coat and/or seed endosperm gene) (or set of seed color genes/alleles). In some embodiments of any of the aspects, the maintainer plant does not comprise any genetic sequences which are ectopic to that plant genus except for the allele(s) of the seed color gene (e.g., seed coat and/or seed endosperm gene) (or set of seed color genes/alleles).

[0177] In some embodiments of any of the aspects, the maintainer plant does not comprise any genetic sequences which are ectopic to that plant species except for the allele(s) of the seed color gene (e.g., seed coat and/or seed endosperm gene) (or set of seed color genes/alleles) and/or the at least one functional allele of the PV gene. In some embodiments of any of the aspects, the maintainer plant does not comprise any genetic sequences which are ectopic to that plant genus except for the allele(s) of the seed color gene (e.g., seed coat and/or seed endosperm gene) (or set of seed color genes/alleles) and/or the at least one functional allele of the PV gene.

[0178] The ectopic alleles and/or inserted alleles/genes/constructs can be inserted at target locus. In some embodiments, the target locus can be the MF or PV gene locus (e.g., the locus where the endogenous MF or PV gene is located) or the target locus can be a different locus that is not the MF or PV gene locus. In some embodiments of any of the aspects, the target locus can be a locus that is not the MF or PV gene locus. In some embodiments of any of the aspects, the ectopic alleles and/or inserted alleles/genes/constructs can be inserted downstream of an endogenous gene. In some embodiments of any of the aspects, the ectopic alleles and/or inserted alleles/genes/constructs does not disrupt the coding sequence and/or expression of an endogenous gene. In some embodiments of any of the aspects, the target locus can be on the same chromosome as the MF gene. In some embodiments of any of the aspects, the target locus can be on the same chromosome arm as the MF gene. In some embodiments of any of the aspects, the target locus can be on the same chromosome as the PV gene. In some embodiments of any of the aspects, the target locus can be on the same chromosome arm as the PV gene. In some embodiments of any of the aspects, the target locus can be on a different chromosome than the MF and PV genes. In some embodiments of any of the aspects, the target locus known in the art to permit expression of inserted genes/constructs. Such target loci are known in the art, e.g., the ANXA1 locus as described in WO 2013/169802, which is incorporated by reference herein in its entirety.

[0179] Where the specification refers to a maintainer line, it is meant that the line is a maintainer of the male-sterile genetics and that some of the maintainer's progeny from self-pollination will be male-sterile. The maintainer plant is not itself male-sterile.

[0180] In some embodiments of any of the aspects, the maintainer plant is substantially isogenic with the male-sterile plant with the exception of the engineered modifications in the first genome. In some embodiments of any of the aspects, the maintainer plant is substantially isogenic with the male-sterile plant with the exception of the engineered modifications on the first chromosome of the pair of homologous chromosomes in the first genome. In some embodiments of any of the aspects, the maintainer plant is substantially isogenic with the male-sterile plant with the exception of the first chromosome of the pair of homologous chromosomes in the first genome of the maintainer plant. In some embodiments of any of the aspects, the maintainer plant is substantially isogenic with the male-sterile plant with the exception of the seed color gene (e.g., seed coat and/or seed endosperm gene) (or set of seed color genes/alleles). In some embodiments of any of the aspects, the maintainer plant is substantially isogenic with the male-sterile plant with the exception of the at least one functional allele of the MF gene and the at least one allele of a seed color gene (e.g., seed coat and/or seed endosperm gene) (or set of seed color genes/alleles).

[0181] In some embodiments of any of the aspects, an ectopic allele or ectopic copy of a gene is a nuclease-null allele. As used herein, a “site-specific guided nuclease-null allele” (also referred to herein as a “nuclease-null allele”) refers to an engineered allele in which the sequence targeted by a selected site-specific guided nuclease (e.g, CRISPR-Cas9 guide sites) in the wild-type sequence have been engineered to comprise silent mutations that do not change the sequence of the polypeptide that the allele codes for, but which change the sequence targeted by the selected site-specific guided nuclease (e.g, CRISPR-Cas9 guide sites) into a sequence(s) which is not targeted the selected site-specific guided nuclease, e.g., is not a CRISPR-Cas9 guide site sequence. Such mutations are possible due to the fact that multiple codons can code for the same amino acid and appropriate mutations for a given sequence can be selected on the basis of known alternative codons. Silent mutations are also referred to herein as synonymous mutations.

[0182] In some embodiments of any of the aspects, a nuclease-null allele comprises 1 mutation, e.g., one nucleotide in the gene is mutated from the wild-type sequence. In some embodiments of any of the aspects, a nuclease-null allele comprises 2 mutations, e.g., two nucleotides in the gene are mutated from the wild-type sequence. In some embodiments of any of the aspects, a nuclease-null allele comprises at least 2 mutations, e.g., at least two nucleotides in the gene are mutated from the wild-type sequence. In some embodiments of any of the aspects, a nuclease-null allele comprises 2-5 mutations, e.g., two to five nucleotides in the gene are mutated from the wild-type sequence. In some embodiments of any of the aspects, a nuclease-null allele comprises 2-4 mutations, e.g., two to four nucleotides in the gene are mutated from the wild-type sequence.

[0183] In some embodiments of any of the aspects, a nuclease-null allele comprises mutations in at least two codons, e.g., at least two codons in the gene are mutated from the wild-type sequence. In some embodiments of any of the aspects, a nuclease-null allele comprises mutations in two codons, e.g., two codons in the gene are mutated from the wild-type sequence. In some embodiments of any of the aspects, a nuclease-null allele comprises mutations in 1-4 codons, e.g., 1-4 codons in the gene are mutated from the wild-type sequence. In some embodiments of any of the aspects, a nuclease-null allele comprises mutations in 2-4 codons, e.g., 2-4 codons in the gene are mutated from the wild-type sequence.

[0184] In some embodiments of any of the aspects, a nuclease-null allele comprises at least two mutations with each mutation occurring in a different codon. In some embodiments of any of the aspects, a nuclease-null allele comprises two mutations with each mutation occurring in a different codon.

[0185] In some embodiments of any of the aspects, the nuclease-null alleles is a CRISPR-null allele.

[0186] Exemplary but non-limiting CRISPR-null alleles are provided in Example 6, along with explanations of their design and production.

[0187] In some embodiments of any of the aspects, a nuclease-null allele of Mfw2 (e.g. a Mfw2′ allele) comprises a sequence comprising one or both of the T to C mutations of SEQ ID NO: 169, relative to SEQ ID NO: 168. In some embodiments of any of the aspects, a nuclease-null allele of Mfw2 (e.g. a Mfw2′ allele) comprises a Mfw2 sequence provided herein which has been modified to comprise one or two T to C mutations corresponding to one or both of the T to C mutations of SEQ ID NO: 169. In some embodiments of any of the aspects, a nuclease-null allele of Mfw2 (e.g. a Mfw2′ allele) comprises a sequence comprising both of the T to C mutations of SEQ ID NO: 169, relative to SEQ ID NO: 168. In some embodiments of any of the aspects, a nuclease-null allele of Mfw2 (e.g. a Mfw2′ allele) comprises a Mfw2 sequence provided herein which has been modified to comprise two T to C mutations corresponding to both of the T to C mutations of SEQ ID NO: 169.

[0188] In some embodiments of any of the aspects, a nuclease-null allele of Mfw2 (e.g., a Mfw2′ allele) comprises a a Mfw2 sequence provided herein which has been modified to comprise a G>A mutation as shown in SEQ ID NO: 239, relative to SEQ ID NO: 238 and 188:

Wild-type allele sequence
cccACGCGGCACTAACTACTATC (SEQ ID NO: 238, a
portion of SEQ ID NO: 188)
Nuclease-null allele sequence
(SEQ ID NO: 239)
cccACGCAGCACTAACTACTATC

[0189] Alternatively, the Mfw2′ allele comprises a naturally-occurring sequence comprising a G>A mutation as shown in SEQ ID NO: 239, relative to SEQ ID NO: 238 and 188. SEQ ID NO: 238 also presents a guide sequence that can be used to target Mfw2′ with a site-specific guided nuclease. This nuclease-null variant allele is known to naturally occur in certain wheat accessions, e.g., in Buck Meteoro which is available commercially from Buck Semillas S. A., (Necochea, Argentina) or Argenetics Seeds, S. A. (Colon, Argentina). An advantage of this nuclease-null allele is that it is a naturally-occurring allele. Other nuclease-null alleles of Mfw2 known in the art and plants comprising such alleles can be utilized in the methods and processes described herein.

[0190] In some embodiments of any of the aspects, a nuclease-null allele of PV1 (e.g. a PV1′ allele) comprises a sequence comprising one or both of the G to A mutations of SEQ ID NO: 167, relative to SEQ ID NO: 166. In some embodiments of any of the aspects, a nuclease-null allele of PV1 (e.g. a PV1′ allele) comprises a PV1 sequence provided herein which has been modified to comprise one or two G to A mutations corresponding to one or both of the G to A mutations of SEQ ID NO: 167. In some embodiments of any of the aspects, a nuclease-null allele of PV1 (e.g. a PV1′ allele) comprises a sequence comprising both of the G to A mutations of SEQ ID NO: 167, relative to SEQ ID NO: 166. In some embodiments of any of the aspects, a nuclease-null allele of PV1 (e.g. a PV1′ allele) comprises a PV1 sequence provided herein which has been modified to comprise two G to A mutations corresponding to both of the G to A mutations of SEQ ID NO: 167.

[0191] Use of nuclease-null ectopic alleles permits the introduction or insertion of the ectopic alleles before or during use of nuclease to knock-out endogenous alleles. This can be of particular use when introducing the genetic systems described herein into a new line while avoiding the need to insert ectopic allees or copies into the new line by molecular biology techniques. For instance, a wildtype elite line can be crossed and back-crossed onto an extant maintainer line, with selection for maximum elite line conformity (e.g., by genome wide SNPs and plant phenotype) as well as the necessary maintainer cassettes. Once suitable elite line conformity and the presence of the maintainer cassettes or systems described herein are present, the endogenous Mfw and PV alleles can be knocked out as a last stage of preparing the new maintainer lines without such knockout affecting the inserted nuclease-null alleles.

[0192] In some embodiments of any of the aspects, the at least one functional ectopic allele of a MF gene and at least one functional ectopic allele of a seed color gene (e.g., seed coat and/or seed endosperm gene) (or set of seed color genes/alleles) comprises a sequence with at least 80%, at least 85%, at least 90%, at least 95%, at least 98% or greater sequence identity to the sequence of SEQ ID NO: 173. In some embodiments of any of the aspects, the at least one functional ectopic allele of a PV gene comprises a sequence with at least 80%, at least 85%, at least 90%, at least 95%, at least 98% or greater sequence identity to the sequence of SEQ ID NO: 172. In some embodiments of any of the aspects, the at least one functional ectopic allele of a MF gene and at least one functional ectopic allele of a seed color gene (e.g., seed coat and/or seed endosperm gene) (or set of seed color genes/alleles) comprises a sequence with at least 80%, at least 85%, at least 90%, at least 95%, at least 98% or greater sequence identity to the sequence of SEQ ID NO: 173 and the at least one functional ectopic allele of a PV gene comprises a sequence with at least 80%, at least 85%, at least 90%, at least 95%, at least 98% or greater sequence identity to the sequence of SEQ ID NO: 172. In some embodiments of any of the aspects, the at least one functional ectopic allele of a MF gene and at least one functional ectopic allele of a seed color gene (e.g., seed coat and/or seed endosperm gene) (or set of seed color genes/alleles) comprises the sequence of SEQ ID NO: 173. In some embodiments of any of the aspects, the at least one functional ectopic allele of a PV gene comprises the sequence of SEQ ID NO: 172. In some embodiments of any of the aspects, the at least one functional ectopic allele of a MF gene and at least one functional ectopic allele of a seed color gene (e.g., seed coat and/or seed endosperm gene) (or set of seed color genes/alleles) comprises the sequence of SEQ ID NO: 173 and the at least one functional ectopic allele of a PV gene comprises the sequence of SEQ ID NO: 172.

[0193] The maintainer (for male-sterility) compositions and methods described herein, particularly those relating to nuclease-null (e.g., CRISPR-null) MF and PV alleles, are suitable for use with all small grains, e.g., wheat, triticale, canola/oilseed rape, indian mustard, barley, rice, oat, or rye. MF and PV genes endogenous to non-wheat small grain species can be readily identified as the homologs or orthologs of the wheat MF or PV genes provided herein. Homologs or orthologs of the MF and PV genes provided herein can be identified by, e.g., searching a plant's genomic sequence data using a MF or PV sequence provided herein and identifying gene in the plant's genome with the degree of homology (percent identity) as the homolog or ortholog. In some embodiments of any of the aspects, a homolog or ortholog of a MF or PV gene described herein is a gene with at least 60%, at least 65%, at least 70%, at least 75%, at least 80%, at least 85%, at least 90%, at least 91%, at least 92%, at least 93%, at least 94%, at least 95%, at least 96%, at least 97%, at least 98%, at least 99%, or more, identical (e.g, at the genomic sequence level, coding sequence level, or amino acid sequence level) to a MF or PV gene described herein. In some embodiments of any of the aspects, a homolog or ortholog of a MF or PV gene described herein is a gene with at least 60%, at least 65%, at least 70%, at least 75%, at least 80%, at least 85%, at least 90%, at least 91%, at least 92%, at least 93%, at least 94%, at least 95%, at least 96%, at least 97%, at least 98%, at least 99%, or more, identical at the genomic sequence level to a MF or PV gene described herein. In some embodiments of any of the aspects, a homolog or ortholog of a MF or PV gene described herein is a gene with at least 60% identical at the genomic sequence level to a MF or PV gene described herein. In some embodiments of any of the aspects, a homolog or ortholog of a MF or PV gene described herein is a gene with at least 80%, at least 85%, at least 90%, at least 91%, at least 92%, at least 93%, at least 94%, at least 95%, at least 96%, at least 97%, at least 98%, at least 99%, or more, identical at the coding sequence level to a MF or PV gene described herein. In some embodiments of any of the aspects, a homolog or ortholog of a MF or PV gene described herein is a gene with at least 80% identical at the coding sequence level to a MF or PV gene described herein. In some embodiments of any of the aspects, a homolog or ortholog of a MF or PV gene described herein is a gene with at least 80%, at least 85%, at least 90%, at least 91%, at least 92%, at least 93%, at least 94%, at least 95%, at least 96%, at least 97%, at least 98%, at least 99%, or more, identical at the amino acid sequence level to a MF or PV gene described herein. In some embodiments of any of the aspects, a homolog or ortholog of a MF or PV gene described herein is a gene with at least 80% identical at the amino acid sequence level to a MF or PV gene described herein. Sequence data for the plant species described herein is freely available at, e.g., in the Ensembl Plants database, available on the world wide web at plants.ensembl.org/index.html.

[0194] In some embodiments of any of the aspects, the plant is not wheat, the MF gene is the gene in the plant with the highest degree of homology (e.g., at least 90% homology) to a gene selected from Table 1, and the PV gene is the gene in the plant with the highest degree of homology (e.g., at least 90% homology) to PV1 or PV2. In some embodiments of any of the aspects, the plant is not wheat, the MF gene is the gene in the plant with the highest degree of homology (e.g., at least 90% homology) to Mfw2, and the PV gene is the gene in the plant with the highest degree of homology (e.g., at least 90% homology) to PV1 or PV2. In some embodiments of any of the aspects, the plant is not wheat, the MF gene is is the gene in the plant with the highest degree of homology (e.g., at least 90% homology) to Mfw2, and the PV gene is the gene in the plant with the highest degree of homology (e.g., at least 90% homology) to PV1. In some embodiments of any of the aspects, the plant is not wheat, the MF gene is the gene in the plant with the highest degree of homology (e.g., at least 90% homology) to Mfw2, and the PV gene is the gene in the plant with the highest degree of homology (e.g., at least 90% homology) to PV2. In some embodiments of any of the aspects, the plant is barley and the MF gene is HORVU7Hr1G029930, HORVU.MOREX.r3.7HG0658750.1 (a homolog of Mfw2), or HORVU.MOREX.r3.4HG0333500 (a homolog of Ms1), e.g., as provided in the Ensembl Plant database. In some embodiments of any of the aspects, the plant is barley and the PV gene is HORVU7Hr1G001280, HORVU.MOREX.r3.7HG0635710.1 (a homolog of PV1/NPG1), HORVU.MOREX.r3.4HG0331330.1 (a homolog of PV2/ANX1), or HORVU.MOREX.r3.7HG0642320.1 (a homolog of PV3/RUPO) e.g., as provided in the Ensembl Plant database.

[0195] In some embodiments of any of the aspects, a functional allele of HORVU7Hr1G029930 shares at least 80% sequence identity with SEQ ID NO: 170. In some embodiments of any of the aspects, a functional allele of HORVU7Hr1G029930 displays the same type of activity and shares at least 80% sequence identity with SEQ ID NO: 170. In some embodiments of any of the aspects a functional allele of HORVU7Hr1G029930 shares at least 80%, at least 85%, at least 90%, at least 95%, at least 98%, or greater sequence identity with SEQ ID NO: 170. In some embodiments of any of the aspects, a functional allele of HORVU7Hr1G029930 displays the same type of activity and shares at least 80%, at least 85%, at least 90%, at least 95%, at least 98%, or greater sequence identity with SEQ ID NO: 170. In some embodiments of any of the aspects, a functional allele of HORVU7Hr1G029930 shares at least 95% sequence identity with SEQ ID NO: 170. In some embodiments of any of the aspects a functional allele of HORVU7Hr1G029930 displays the same type of activity and shares at least 95% sequence identity with SEQ ID NO: 170. In some embodiments of any of the aspects, the functional allele of a functional allele of HORVU7Hr1G029930 is SEQ ID NO: 170. In some embodiments of any of the aspects, a MF gene can be the gene from a species, cultivar, or variety which has the highest degree of homology and/or sequence identity of the genes in that species', cultivar's or variety's genome with one of the foregoing sequences.

[0196] In some embodiments of any of the aspects, a functional allele of HORVU.MOREX.r3.7HG0658750.1 shares at least 80% sequence identity with SEQ ID NO: 247, 248, and/or 249. In some embodiments of any of the aspects, a functional allele of HORVU.MOREX.r3.7HG0658750.1 displays the same type of activity and shares at least 80% sequence identity with SEQ ID NO: 247, 248, and/or 249. In some embodiments of any of the aspects a functional allele of HORVU.MOREX.r3.7HG0658750.1 shares at least 80%, at least 85%, at least 90%, at least 95%, at least 98%, or greater sequence identity with SEQ ID NO: 247, 248, and/or 249. In some embodiments of any of the aspects, a functional allele of HORVU.MOREX.r3.7HG0658750.1 displays the same type of activity and shares at least 80%, at least 85%, at least 90%, at least 95%, at least 98%, or greater sequence identity with SEQ ID NO: 247, 248, and/or 249. In some embodiments of any of the aspects, a functional allele of HORVU.MOREX.r3.7HG0658750.1 shares at least 95% sequence identity with SEQ ID NO: 247, 248, and/or 249. In some embodiments of any of the aspects a functional allele of HORVU.MOREX.r3.7HG0658750.1 displays the same type of activity and shares at least 95% sequence identity with SEQ ID NO: 247, 248, and/or 249. In some embodiments of any of the aspects, the functional allele of a functional allele of HORVU.MOREX.r3.7HG0658750.1 is SEQ ID NO: 247, 248, and/or 249. In some embodiments of any of the aspects, a MF gene can be the gene from a species, cultivar, or variety which has the highest degree of homology and/or sequence identity of the genes in that species', cultivar's or variety's genome with one of the foregoing sequences.

[0197] In some embodiments of any of the aspects, a functional allele of HORVU.MOREX.r3.4HG0333500 shares at least 80% sequence identity with SEQ ID NO: 250, 251, and/or 252. In some embodiments of any of the aspects, a functional allele of HORVU.MOREX.r3.4HG0333500 displays the same type of activity and shares at least 80% sequence identity with SEQ ID NO: 250, 251, and/or 252. In some embodiments of any of the aspects a functional allele of HORVU.MOREX.r3.4HG0333500 shares at least 80%, at least 85%, at least 90%, at least 95%, at least 98%, or greater sequence identity with SEQ ID NO: 250, 251, and/or 252. In some embodiments of any of the aspects, a functional allele of HORVU.MOREX.r3.4HG0333500 displays the same type of activity and shares at least 80%, at least 85%, at least 90%, at least 95%, at least 98%, or greater sequence identity with SEQ ID NO: 250, 251, and/or 252. In some embodiments of any of the aspects, a functional allele of HORVU.MOREX.r3.4HG0333500 shares at least 95% sequence identity with SEQ ID NO: 250, 251, and/or 252. In some embodiments of any of the aspects a functional allele of HORVU.MOREX.r3.4HG0333500 displays the same type of activity and shares at least 95% sequence identity with SEQ ID NO: 250, 251, and/or 252. In some embodiments of any of the aspects, the functional allele of a functional allele of HORVU.MOREX.r3.4HG0333500 is SEQ ID NO: 250, 251, and/or 252. In some embodiments of any of the aspects, a MF gene can be the gene from a species, cultivar, or variety which has the highest degree of homology and/or sequence identity of the genes in that species', cultivar's or variety's genome with one of the foregoing sequences.

[0198] In some embodiments of any of the aspects, a functional allele of HORVU7Hr1G001280 shares at least 80% sequence identity with SEQ ID NO: 171. In some embodiments of any of the aspects, a functional allele of HORVU7Hr1G001280 displays the same type of activity and shares at least 80% sequence identity with SEQ ID NO: 171. In some embodiments of any of the aspects a functional allele of HORVU7Hr1G001280 shares at least 80%, at least 85%, at least 90%, at least 95%, at least 98%, or greater sequence identity with SEQ ID NO: 171. In some embodiments of any of the aspects, a functional allele of HORVU7Hr1G001280 displays the same type of activity and shares at least 80%, at least 85%, at least 90%, at least 95%, at least 98%, or greater sequence identity with SEQ ID NO: 171. In some embodiments of any of the aspects, a functional allele of HORVU7Hr1G001280 shares at least 95% sequence identity with SEQ ID NO: 171. In some embodiments of any of the aspects a functional allele of HORVU7Hr1G001280 displays the same type of activity and shares at least 95% sequence identity with SEQ ID NO: 171. In some embodiments of any of the aspects, the functional allele of a functional allele of HORVU7Hr1G001280 is SEQ ID NO: 171. In some embodiments of any of the aspects, a PV gene can be the gene from a species, cultivar, or variety which has the highest degree of homology and/or sequence identity of the genes in that species', cultivar's or variety's genome with one of the foregoing sequences.

[0199] In some embodiments of any of the aspects, a functional allele of HORVU.MOREX.r3.7HG0635710.1 shares at least 80% sequence identity with SEQ ID NO: 238, 239, and/or 240. In some embodiments of any of the aspects, a functional allele of HORVU.MOREX.r3.7HG0635710.1 displays the same type of activity and shares at least 80% sequence identity with SEQ ID NO: 238, 239, and/or 240. In some embodiments of any of the aspects a functional allele of HORVU.MOREX.r3.7HG0635710.1 shares at least 80%, at least 85%, at least 90%, at least 95%, at least 98%, or greater sequence identity with SEQ ID NO: 238, 239, and/or 240. In some embodiments of any of the aspects, a functional allele of HORVU.MOREX.r3.7HG0635710.1 displays the same type of activity and shares at least 80%, at least 85%, at least 90%, at least 95%, at least 98%, or greater sequence identity with SEQ ID NO: 238, 239, and/or 240. In some embodiments of any of the aspects, a functional allele of HORVU.MOREX.r3.7HG0635710.1 shares at least 95% sequence identity with SEQ ID NO: 238, 239, and/or 240. In some embodiments of any of the aspects a functional allele of HORVU.MOREX.r3.7HG0635710.1 displays the same type of activity and shares at least 95% sequence identity with SEQ ID NO: 238, 239, and/or 240. In some embodiments of any of the aspects, the functional allele of a functional allele of HORVU.MOREX.r3.7HG0635710.1 is SEQ ID NO: 238, 239, and/or 240. In some embodiments of any of the aspects, a PV gene can be the gene from a species, cultivar, or variety which has the highest degree of homology and/or sequence identity of the genes in that species', cultivar's or variety's genome with one of the foregoing sequences.

[0200] In some embodiments of any of the aspects, a functional allele of HORVU.MOREX.r3.4HG0331330.1 shares at least 80% sequence identity with SEQ ID NO: 241, 242, and/or 243. In some embodiments of any of the aspects, a functional allele of HORVU.MOREX.r3.4HG0331330.1 displays the same type of activity and shares at least 80% sequence identity with SEQ ID NO: 241, 242, and/or 243. In some embodiments of any of the aspects a functional allele of HORVU.MOREX.r3.4HG0331330.1 shares at least 80%, at least 85%, at least 90%, at least 95%, at least 98%, or greater sequence identity with SEQ ID NO: 241, 242, and/or 243. In some embodiments of any of the aspects, a functional allele of HORVU.MOREX.r3.4HG0331330.1 displays the same type of activity and shares at least 80%, at least 85%, at least 90%, at least 95%, at least 98%, or greater sequence identity with SEQ ID NO: 241, 242, and/or 243. In some embodiments of any of the aspects, a functional allele of HORVU.MOREX.r3.4HG0331330.1 shares at least 95% sequence identity with SEQ ID NO: 241, 242, and/or 243. In some embodiments of any of the aspects a functional allele of HORVU.MOREX.r3.4HG0331330.1 displays the same type of activity and shares at least 95% sequence identity with SEQ ID NO: 241, 242, and/or 243. In some embodiments of any of the aspects, the functional allele of a functional allele of HORVU.MOREX.r3.4HG0331330.1 is SEQ ID NO: 241, 242, and/or 243. In some embodiments of any of the aspects, a PV gene can be the gene from a species, cultivar, or variety which has the highest degree of homology and/or sequence identity of the genes in that species', cultivar's or variety's genome with one of the foregoing sequences.

[0201] In some embodiments of any of the aspects, a functional allele of HORVU.MOREX.r3.7HG0642320.1 shares at least 80% sequence identity with SEQ ID NO: 244, 245, and/or 246. In some embodiments of any of the aspects, a functional allele of HORVU.MOREX.r3.7HG0642320.1 displays the same type of activity and shares at least 80% sequence identity with SEQ ID NO: 244, 245, and/or 246. In some embodiments of any of the aspects a functional allele of HORVU.MOREX.r3.7HG0642320.1 shares at least 80%, at least 85%, at least 90%, at least 95%, at least 98%, or greater sequence identity with SEQ ID NO: 244, 245, and/or 246. In some embodiments of any of the aspects, a functional allele of HORVU.MOREX.r3.7HG0642320.1 displays the same type of activity and shares at least 80%, at least 85%, at least 90%, at least 95%, at least 98%, or greater sequence identity with SEQ ID NO: 244, 245, and/or 246. In some embodiments of any of the aspects, a functional allele of HORVU.MOREX.r3.7HG0642320.1 shares at least 95% sequence identity with SEQ ID NO: 244, 245, and/or 246. In some embodiments of any of the aspects a functional allele of HORVU.MOREX.r3.7HG0642320.1 displays the same type of activity and shares at least 95% sequence identity with SEQ ID NO: 244, 245, and/or 246. In some embodiments of any of the aspects, the functional allele of a functional allele of HORVU.MOREX.r3.7HG0642320.1 is SEQ ID NO: 244, 245, and/or 246. In some embodiments of any of the aspects, a PV gene can be the gene from a species, cultivar, or variety which has the highest degree of homology and/or sequence identity of the genes in that species', cultivar's or variety's genome with one of the foregoing sequences.

[0202] The methods and compositions described herein are particularly applicable to polyploidal plants. In some embodiments of any of the aspects, the plant or cell is polyploidal, e.g., tetraploid or hexaploid. In some embodiments of any of the aspects, the plant or cell is wheat, e.g., hexaploid wheat, tetraploid wheat, Triticum aestivum, or Triticum durum. In some embodiments of any of the aspects, the plant or cell is triticale, oat, canola/oilseed rape or indian mustard. In some embodiments of any of the aspects, the plant or cell is an elite breeding line.

[0203] In some embodiments of any of the aspects, the male-fertile maintainer plant or cell is tetraploid and the second genome comprises loss-of-function alleles of the MF gene at the native MF gene loci and loss-of-function alleles of the PV gene at the native PV gene loci. In some embodiments of any of the aspects, the male-fertile maintainer plant or cell is hexaploid and the second and third genomes both comprise loss-of-function alleles of the MF gene at the native MF gene loci and loss-of-function alleles of the PV gene at the native PV gene loci.

[0204] The plants and cells described herein comprise one or more of: certain loss-of-function alleles, at least one functional MF allele, at least one allele of a seed color gene (e.g., seed coat and/or seed endosperm gene) (or set of seed color genes/alleles), and at least one functional PV allele; which are engineered and are referred to collectively as “engineered modifications.” The engineered modifications described herein can be generated by any method known in the art, e.g., by homolgous recombination-mediated mutagenesis, random mutagenesis, or by using a site-specific guided nuclease. In some embodiments of any of the aspects, at least one copy of any of the engineered modifications is engineered by using a site-specific guided nuclease. In some embodiments of any of the aspects, the engineered modifications are engineered by using a site-specific guided nuclease.

[0205] Various site-specific guided nucleases are known in the art and can include, by way of non-limiting example, transcription activator-like effector nucleases (TALENs), oligonucleotides, meganucleases, and zinc-finger nucleases. Toolkits and services for zinc-finger nuclease mutagenesis are commercially available, for example EXZACT™ Precision Technology, marketed by Dow AgroSciences.

[0206] In some embodiments of any of the aspects, the site-specific guided nuclease is a CRISPR-associated (Cas) system such as CRISPR-Cas9 (e.g., Cas9, a Cas9-derived nickase, or a Cas9 homolog (e.g., Cpf1)). CRISPR is an acronym for clustered regularly interspaced short palindromic repeats. Briefly, in order for a Cas nuclease (or related nuclease) to recognize and cleave a target nucleic acid molecule, a CRISPR RNA (crRNA) and trans-activating crRNA (tracrRNA) must be present. crRNAs hybridize with tracrRNA to form a guide RNA (sgRNA) which then associates with the Cas nuclease. Alternatively, the sgRNA can be provided as a single contiguous sgRNA. Once the sgRNA is complexed with Cas, the complex can bind to a target nucleic acid molecule. The sgRNA binds specifically to a complementary target sequence via a target-specific sequence in the crRNA portion (e.g., the spacer sequence), while Cas itself binds to a protospacer adjacent motif (CRISPR/Cas protospacer-adjacent motif; PAM). The Cas nuclease then mediates cleavage of the target nucleic acid to create a double-stranded break within the sequence bound by the sgRNA. Deletions can be generated by, e.g., using the nuclease to cut a genome at two specific locations targeted with two sgRNAs each specific to one of the two locations concerned, thereby excising the sequence between the two double-strand breaks. CRISPR-Cas technology for editing of plant genomes is fully described in Belhaj et al. (2015). This is a practicable, convenient and flexible method of gene editing. It has been shown to work well in plants, see for example in Belhaj et al. (2015); Wang et al. (2014; Nature Biotechnology32:947-951); and Shan et al. (2014). The latter paper gives full protocols to enable the system to be applied to modify plant genomes (including wheat) as desired.

[0207] As described herein, an engineered modification can be introduced by utilizing the CRISPR/Cas system. In some embodiments of any of the aspects, the site-specific guided nuclease is a form of CRISPR-Cas, e.g., CRISPR-Cas9. In some embodiments of any of the aspects, the engineered modifications are created using a site-specific guided nuclease and a multi-guide construct.

[0208] In some embodiments of any of the aspects, a plant or plant cell described herein can further comprise an exogenous or introduced endonuclease or a nucleic acid encoding such an endonuclease (e.g., Cas9, a Cas9-derived nickase, or a Cas9 homolog (e.g., Cpf1)). In some embodiments of any of the aspects, a plant or seed as described herein can further comprise a CRISPR RNA sequence designed to target an endonuclease to the gene, e.g. (a crRNA and trans-activating crRNA (tracrRNA) and/or a guide RNA (sgRNA)). In some embodiments of any of the aspects, the sgRNA is provided as a single continuous nucleic acid molecule. In some embodiments of any of the aspects, the sgRNA is provided as a set of hybridized molecules, e.g., a crRNA and tracrRNA. In some embodiments of any of the aspects, the sgRNA is provided as a DNA molecule encoding a sgRNA and/or a crRNA and tracrRNA. Design of sgRNAs, crRNAs, and tracrRNAs are known in the art and described elsewere herein. Exemplary sgRNA sequences are provided elsewhere herein (e.g., SEQ ID NOs: 22-25 or SEQ ID NO: 156 for Mfwl, SEQ ID NOs: 26-29 for Mfw2, SEQ ID NOs: 131-134 for Mfw3-A, SEQ ID NOs: 135-138 for Mfw3-B, SEQ ID NOs: 139-142 for Mfw3-D, SEQ ID NOs: 143-146 for Mfw5-A, SEQ ID NOs: 147-150 for Mfw5-B, SEQ ID NOs: 151-154 for Mfw5-D) and described in detail in International Patent Publication WO 2018/022410 and Milner et al. Plant Direct 2020 4(3):e00201; each of which are incorporated by reference herein in their entireties. In some embodiments of any of the aspects, a multi-guide construct is provided, e.g., multiple sgRNA are provided in a single construct and/or nucleic acid molecule such that multiple target sequences are cleaved in the presence of a Cas enzyme and the multi-guide construct.

sgRNA for Mfw1
SEQ ID NO: 156
GGGGGATGGGGGCTTACGTAGGG

[0209] As used herein, “target sequence” within the context of a site-specific guided nuclease refers to a sequence in the relevant genome which is to be used to specify where the nuclease will generate a break or nick in the genome at a desired location. In the case of Cas (and related) nucleases, the guide RNA is designed to specifically hybridize to the target sequence, or in the case of multi-guide constructs, multiple guide RNAs are provided, each of which specifically hybrizes to a target sequence. Target sequences can be identified using the publicly available program DREG (available on the world wide web at emboss.sourceforge.net/apps/cvs/emboss/apps/dreg.html) to find sequences that match either ANNNNNNNNNNNNNNNNNNNNGG or GNNNNNNNNNNNNNNNNNNNNGG in both directions of the genomic sequence. As an illustrative example, guides can be selected from the results based on the following criteria: that the target sequence is conserved in all homoeologues which are to be modified, that it has a restriction enzyme site near the site of the protospacer associated motif (PAM) but in the sequence of the guide RNA and finally, prioritizing guides near the start of the coding sequences of each gene. An additional consideration can be to select sequences with either AN20GG and GN20GG as this stabilizes the construct for transformation in the plant.

[0210] By way of non-limiting example, exemplary guide sequences for generating mutations in a target sequence include SEQ ID NOs: 22-25 or SEQ ID NO: 156 for Mfwl, SEQ ID NOs: 26-29, and 238-239 for Mfw2, SEQ ID NOs: 131-134 for Mfw3-A, SEQ ID NOs: 135-138 for Mfw3-B, SEQ ID NOs: 139-142 for Mfw3-D, SEQ ID NOs: 143-146 for Mfw5-A, SEQ ID NOs: 147-150 for Mfw5-B, and/or SEQ ID NOs: 151-154 for Mfw5-D.

[0211] Guide sequence expression can be driven by individual and/or shared promoters. Exemplary promoters include OsU3, TaU3, TaU6 and OsU6 promoters. Guide constructs, expressing one or more sgRNA sequences, can be cloned into a vector suitable for expressing the sgRNAs in the plant, e.g., a binary vector containing a wheat-optimized Cas9 enzyme driven by the rice actin promoter can be used in wheat. Vectors can be introduced into the plant or plant cell by any means known in the art, e.g. by Agrobacterium. Alternatively, the sgRNAs can be expressed in vitro and introduced into cells by, e.g., microinjection.

[0212] Cas9 and sgRNA sequences can be expressed either stably or transiently in a cell in order to generate the engineered modifications described herein. In one aspect of any of the embodiments, described herein is a plant cell comprising 1) an exogenous Cas9 protein and/or an exogenous nucleic acid encoding a Cas9 protein; and 2) at least one sgRNA capable of specifically hybridizing with at least one target sequence of a gene described herein under cellular conditions or a nucleic acid encoding such an sgRNA. In some embodiments of any of the aspects, the 1) exogenous nucleic acid encoding a Cas9 protein; and 2) the nucleic acid encoding at least one sgRNA capable of specifically hybridizing with the target sequence(s) under cellular conditions are provided in a vector or vector(s). In some embodiments of any of the aspects, the vectors are transient expression vectors. In some embodiments of any of the aspects, the 1) exogenous nucleic acid encoding a Cas9 protein; and 2) the nucleic acid encoding at least one sgRNA are integrated into the genome. It is contemplated herein that similar approaches to vector delivery, transient expression, and/or stable integration can also be utilized in embodiments relating to, e.g., TALENs, and/or ZFNs.

[0213] The Cas enzyme and guide sequences can be provided in non-integrating vectors, e.g., to avoid incorporation of these sequences in the genome of the plant.

[0214] In one aspect of any of the embodiments, described herein is a nucleic acid encoding at least one sgRNA capable of specifically hybridizing with at least one gene sequence described herein, e.g., under cellular conditions. In one aspect of any of the embodiments, described herein is a nucleic acid encoding at least one sgRNA capable of targeting Cas9 or a related endonuclease to at least one gene described herein, e.g., under cellular conditions. In some embodiments of any of the aspects, the nucleic acid further encodes a Cas9 protein. In some embodiments of any of the aspects, the nucleic acid is provided in a vector. In some embodiments of any of the aspects, the vector is a transient expression vector.

[0215] Following contact with a site-specific nuclease, e.g., a Cas (or related) enzyme and at least one guide RNA, plants can be screened for deactivating modifications, e.g., utilizing a PCR based method where the PCR product is digested with an appropriate enzyme previously identified to cut the DNA at a site near the PAM. PCR products which are not cut therefore contain a modification induced by the CRISPR construct.

[0216] In some embodiments of any of the aspects, a loss-of-function or knockout allele of a gene can comprise a deletion generated by CRISPR/Cas. In some embodiments of any of the aspects, a loss-of-function or knockout allele of a gene can be made/engineered/mutated/created by contacting a plant/plant cell with CRISPR/Cas and at least one sgRNA capable of targeting the gene, thereby creating a deletion in or of the gene.

[0217] In some embodiments of any of the aspects, a loss-of-function or knockout allele of a gene can comprise a “prime edit” generated by CRISPR/Cas (e.g., a Cas-reverse transcriptase fusion). Prime editing is a technique in which Cas is fused to a reverse transcriptase and the guide RNA further comprises an edit-containing RNA template. When the edit-containing RNA template comprises a template for a premature stop codon, the combined activity of the Cas-reverse transcriptase fusion introduces a premature stop codon in the targeted gene. In some embodiments of any of the aspects, a loss-of-function or knockout allele of a gene can be made/engineered/mutated/created by contacting a plant/plant cell with CRISPR/Cas and at least one guide RNA further comprising an edit-containing RNA template and capable of targeting the gene, thereby creating a prime edit in or of the gene. In some embodiments of any of the aspects, the prime edit comprises a premature stop codon. Prime editing techniques are well known in the art and are further discussed, e.g., in Scholefield et al. Gene Therapy volume 28, pages 396-401 (2021); and Anzalone et al. Nature volume 576, pages 149-157 (2019); each of which is incorporated by reference herein in its entirety.

[0218] In any of the methods described herein, nucleases, guide RNAs, sgRNA, and/or nuclease fusion proteins can be introduced or inserted by any method known in the art, e.g., biolistic delivery, or vector delivery (e.g., viral vectors or T-DNA vectors). Methods of transforming plants/plant cells are well known in the art. In some embodiments of any of the aspects, contacting a plant/cell with a nuclease/guide RNA/sgRNA/nuclease fusion protein comprises contacting the plant/plant cell(s) with a viral vector comprising the nuclease/guide RNA/sgRNA/nuclease fusion protein. In some embodiments of any of the aspects, contacting a plant/cell with a nuclease/guide RNA/sgRNA/nuclease fusion protein comprises contacting the plant/plant cell(s) with a T-DNA vector comprising the nuclease/guide RNA/sgRNA/nuclease fusion protein. In some embodiments of any of the aspects, introducing or inserting a nuclease/guide RNA/sgRNA/nuclease fusion protein into a plant/plant cell comprises contacting the plant/plant cell(s) with a viral vector comprising the nuclease/guide RNA/sgRNA/nuclease fusion protein. In some embodiments of any of the aspects, introducing or inserting a nuclease/guide RNA/sgRNA/nuclease fusion protein into a plant/plant cell comprises contacting the plant/plant cell(s) with a T-DNA vector comprising the nuclease/guide RNA/sgRNA/nuclease fusion protein.

[0219] In any of the aspects of the methods described herein contacting the plant/plant cell(s) with a nuclease and/or nuclease fusion protein can comprise contacting the plant/plant cell(s) with a recombinase polypeptide, or with a nucleic acid (e.g., a vector) encoding the nuclease and/or nuclease fusion protein. In any of the aspects of the methods described herein contacting the plant/plant cell(s) with a nuclease and/or nuclease fusion protein can comprise introducing into the plant/plant cell(s) a recombinase polypeptide, or a nucleic acid (e.g., a vector) encoding the nuclease and/or nuclease fusion protein. In embodiments relating to a nucleic acid (e.g., a vector) encoding the nuclease and/or nuclease fusion protein, a step of removing or selecting out the nucleic acid encoding the nuclease and/or nuclease fusion protein after the relevant knock-out or loss-of-function allles are created/mutated/engineered.

[0220] In alternative embodiments, an engineered modification can be introduced by utilizing TALENs or ZFN technology, which are known in the art. Methods of engineering nucleases to achieve a desired sequence specificity are known in the art and are described, e.g., in Kim (2014); Kim (2012); Belhaj et al. (2013); Urnov et al. (2010); Bogdanove et al. (2011); Jinek et al. (2012) Silva et al. (2011); Ran et al. (2013); Carlson et al. (2012); Guerts et al. (2009); Taksu et al. (2010); and Watanabe et al. (2012); each of which is incorporated by reference herein in its entirety.

[0221] In some embodiments of any of the aspects, modifications can be introduced using any of homolgous recombination-mediated mutagenesis, random mutagenesis, or site-specific guided nuclease methods described elsewhere herein, combined with providing one or more template nucleic acids comprising the sequence/gene/allele/construct to be introduced. The template nucleic acids can comprise one or more regions of homology to the target loci in the first genome to direct their introduction at the target loci. Such technologies, and the design of such constructs are known in the art.

[0222] In one aspect of any of the embodiments, described herein is a plant comprising a first genome comprising: on a first chromosome of a pair of homologous chromosomes, at a single target locus, at least one functional ectopic allele of a MF gene and at least one functional ectopic allele of a seed color gene (e.g., seed coat and/or seed endosperm gene) (or at least one functional ectopic allele of each member of a set of seed color genes). In one aspect of any of the embodiments, described herein is a plant comprising a first genome comprising: on a second chromosome of the pair of homologous chromosomes, at the target locus corresponding to the target locus of the first chromosome of the pair of homologous chromosomes, at least one functional ectopic allele of a PV gene.

[0223] In one aspect of any of the embodiments, described herein is a plant comprising a first genome comprising: on a first chromosome of a pair of homologous chromosomes, at a single target locus, at least one functional ectopic allele of a MF gene and at least one functional ectopic allele of a seed color gene (e.g., seed coat and/or seed endosperm gene) (or at least one functional ectopic allele of each member of a set of seed color genes) and loss-of-function alleles of the endogenous MF genes at the native MF gene loci. In one aspect of any of the embodiments, described herein is a plant comprising a first genome comprising: on a first chromosome of a pair of homologous chromosomes, at a single target locus, at least one functional ectopic allele of a MF gene and at least one functional ectopic allele of a seed color gene (e.g., seed coat and/or seed endosperm gene) (or at least one functional ectopic allele of each member of a set of seed color genes) and loss-of-function alleles of the endogenous PV genes at the native PV gene loci. In one aspect of any of the embodiments, described herein is a plant comprising a first genome comprising: on a first chromosome of a pair of homologous chromosomes, at a single target locus, at least one functional ectopic allele of a MF gene and at least one functional ectopic allele of a seed color gene (e.g., seed coat and/or seed endosperm gene) (or at least one functional ectopic allele of each member of a set of seed color genes) and loss-of-function alleles of the endogenous MF genes at the native MF gene loci and loss-of-function alleles of the endogenous PV genes at the native PV gene loci.

[0224] In one aspect of any of the embodiments, described herein is a plant comprising a first genome comprising: on a second chromosome of the pair of homologous chromosomes, at the target locus corresponding to the target locus of the first chromosome of the pair of homologous chromosomes, at least one functional ectopic allele of a PV gene and loss-of-function alleles of the endogenous PV genes at the native PV gene loci. In one aspect of any of the embodiments, described herein is a plant comprising a first genome comprising: on a second chromosome of the pair of homologous chromosomes, at the target locus corresponding to the target locus of the first chromosome of the pair of homologous chromosomes, at least one functional ectopic allele of a PV gene and loss-of-function alleles of the endogenous MF genes at the native MF gene loci. In one aspect of any of the embodiments, described herein is a plant comprising a first genome comprising: on a second chromosome of the pair of homologous chromosomes, at the target locus corresponding to the target locus of the first chromosome of the pair of homologous chromosomes, at least one functional ectopic allele of a PV gene and loss-of-function alleles of the endogenous MF genes at the native MF gene loci and loss-of-function alleles of the endogenous PV genes at the native PV gene loci.

[0225] In one aspect of any of the embodiments, provided herein is a method of producing a male-fertile maintainer plant as described herein, wherein the method comprises:
[0226] b. engineering the seed endosperm gene into the first chromosome of a homologous pair in the first genome and engineering at least one functional allele of a PV gene into the second chromosome of the homologous pair in the first genome;
[0227] c. engineering loss-of-function alleles in/at each allele of a MF gene in the second and any subsequent genomes, and at the allele on the second chromosome of the homologous pair in the first genome;
[0228] d. engineering loss-of-function alleles in/at each native allele of a PV gene in all genomes.
   In some embodiments of any of the aspects, steps b and c can be conducted simultaneously. In some embodiments of any of the aspects, step b is conducted before step c. In some embodiments of any of the aspects, step c is conducted before step b.

[0229] In one aspect of any of the embodiments, provided herein is a method of producing a male-fertile maintainer plant and cognate male-sterile plant as described herein, wherein the method comprises:
[0230] a. engineering the seed endosperm gene into the first chromosome of a homologous pair in the first genome and engineering at least one functional allele of a PV gene into the second chromosome of the homologous pair in the first genome of the maintainer line;
[0231] b. engineering loss-of-function alleles in/at each allele of a MF gene in the second and any subsequent genomes, and at the allele on the second chromosome of the homologous pair in the first genome of the maintainer line;
[0232] c. engineering loss-of-function alleles in/at each native allele of a PV gene in all genomes of the maintainer line; and
[0233] d. engineering loss-of-function alleles in/at each native allele of the MF and PV genes in all genomes of the male-sterile line.
   In some embodiments of any of the aspects, steps b and c can be conducted simultaneously. In some embodiments of any of the aspects, step b is conducted before step c. In some embodiments of any of the aspects, step c is conducted before step b. In some embodiments of any of the aspects, steps b and c can be conducted simultaneously with step d. In some embodiments of any of the aspects, step b and c are conducted before step d. In some embodiments of any of the aspects, step d is conducted before steps b and c.

[0234] In one aspect of any of the embodiments, provided herein is a method of producing a male-fertile maintainer plant as described herein, wherein the method comprises:
[0235] a. engineering at least one functional nuclease-null (e.g., CRISPR-null) allele of a MF gene and a seed endosperm gene (optionally a nuclease-null (e.g., CRISPR-null) allele of a seed endosperm gene) into the first chromosome of a homologous pair in the first genome and engineering at least one functional nuclease-null (e.g., CRISPR-null) allele of a PV gene into the second chromosome of the homologous pair in the first genome;
[0236] b. engineering loss-of-function alleles in/at each allele of a MF gene in all genomes using the nuclease;
[0237] c. engineering loss-of-function alleles in/at each native allele of a PV gene in all genomes using the nuclease.
   In some embodiments of any of the aspects, steps b and c can be conducted simultaneously. In some embodiments of any of the aspects, step b is conducted before step c. In some embodiments of any of the aspects, step c is conducted before step b.

[0238] In one aspect of any of the embodiments, described herein is a method of preparing a male-fertile maintainer plant (or seed thereof) for a male-sterile polyploid plant, the method comprising engineering a plant to comprise: in a first genome: i) on a first chromosome of a pair of homologous chromosomes, at a single target locus, at least one functional ectopic allele of a MF gene and at least one functional ectopic allele of a seed color gene (e.g., seed coat and/or seed endosperm gene) (or set of seed color genes/alleles); ii) on a second chromosome of the pair of homologous chromosomes, at the target locus corresponding to the target locus of the first chromosome of the pair of homologous chromosomes, at least one functional ectopic allele of a PV gene; and iii) loss-of-function alleles of the endogenous MF genes at the native MF gene loci and loss-of-function alleles of the endogenous PV genes at the native PV gene loci. In some embodiments of any of the aspects, the plant further comprises at least one further genome, and the method further comprises engineering loss-of-function alleles of the endogenous MF genes at the native MF gene loci and loss-of-function alleles of the PV gene at the native PV gene loci in each of the at least one further genomes. Methods for engineering such alleles are described elsewhere herein. The engineering of the individual alleles can be done consecutively in any order or contemporaneously.

[0239] In the foregoing methods, the i) MF gene and seed color gene (or set of seed color genes/alleles) and ii) PV gene insertions are made separately. However, further contemplated herein are methods of preparing a male-fertile maintainter plant for a male-sterile polyploid plant in which a construct comprising both i) the MF gene and seed color gene (or set of seed color genes/alleles) and ii) the PV gene is inserted and then either i) or ii) are removed from individual alleles to provide a maintainer plant with the structure described herein. This approach ensures that in the maintainer line, i) the MF gene and seed color gene (or set of seed color genes/alleles) and ii) the PV gene are both located at the same locus and reduces the number of insertions and subsequent screenings necessary. This method has the further advantage that, after the initial cassette insertion at random loci in different transformant plants, the plant with the highest level of expression from the inserted cassette can be selected for the next-stage excisions. Additionally, this method provides a fundamentally different system to set up an allelic pair of genes/alleles which is an alternative to precisely targeted insertions (e.g. targeted to one of the homoeologues of a MF gene as described elsewhere herein). This approach gives users the option to use a different technology which does not rely on precision-targeting mutagenesis technologies.

[0240] Accordingly, in one aspect of any of the embodiments, described herein is a method of preparing a male-fertile maintainer plant for a male-sterile polyploid plant, the method comprising:
[0241] i) inserting, on a first chromosome of a pair of homologous chromosomes in a first genome, at a single target locus, a cassette comprising in 5′ to 3′ or 3′ to 5′ order:
   [0242] a first recognition site for a first recombinase;
   [0243] at least one functional ectopic nuclease null allele of a MF gene and at least one functional ectopic allele of a seed color gene (e.g., seed coat and/or seed endosperm gene) (or at least one functional ectopic allele of each member of a set of seed color genes) in either relative order;
   [0244] a first recognition site for a second recombinase;
   [0245] a selection gene;
   [0246] a second recognition site for the first recombinase;
   [0247] at least one functional ectopic nuclease-null allele of a PV gene;
   [0248] a second recognition site for the second recombinase;
thereby providing a full-cassette insertion plant;
[0249] ii) contacting a first progeny of the full-cassette insertion plant, or a cell thereof, with the first recombinase, thereby excising:
   [0250] one recognition site for the first recombinase, the at least one functional ectopic nuclease null allele of a MF gene and at least one functional ectopic allele of a seed color gene (e.g., seed coat and/or seed endosperm gene) (or at least one functional ectopic allele of each member of a set of seed color genes), the first recognition site for the second recombinase, and the selection gene from the genome of the first progeny and
thereby providing an excised first progeny comprising:
   [0251] one recognition site for the first recombinase, the at least one functional ectopic nuclease-null allele of a PV gene, and the second recognition site for the second recombinase portions of the construct;
[0252] iii) contacting a second progeny of the full-cassette insertion plant, or a cell thereof, with the second recombinase,
thereby excising:
   [0253] one recognition site for the second recombinase, the selection gene, the second recognition site for the first recombinase and at least one functional ectopic nuclease-null allele of a PV gene, and
thereby providing an excised second progeny comprising:
   [0254] one recognition site for the second recombinase, the first recognition site for the first recombinase, and the at least one functional ectopic nuclease null allele of a MF gene and at least one functional ectopic allele of a seed color gene (e.g., seed coat and/or seed endosperm gene) (or at least one functional ectopic allele of each member of a set of seed color genes) portions of the construct;
[0255] iv) crossing the excised first progeny provided in step ii) and the excised second progeny provided in step iii), thereby providing a third progeny comprising, in a first genome,
   [0256] on a first chromosome of a pair of homologous chromosomes, at a single target locus, the at least one functional ectopic nuclease-null allele of a MF gene and the at least one functional ectopic allele of a seed color gene (e.g., seed coat and/or seed endosperm gene) (or at least one functional ectopic allele of each member of a set of seed color genes);
   [0257] on a second chromosome of the pair of homologous chromosomes, at the target locus corresponding to the target locus of the first chromosome of the pair of homologous chromosomes, the at least one functional ectopic nuclease-null allele of a PV gene; and
[0258] v) mutating the the endogenous MF genes at the native MF gene loci and the endogenous PV genes at the native PV gene loci to create loss-of-function alleles, optionally wherein the loss-of-function alleles are caused by contacting the genome with a site-specific guided nuclease (e.g., CRISPR) and one or more guide RNA sequences or multi-guide constructs, thereby providing male-fertile maintainer plant.

[0259] A cassette comprising all of:
[0260] a first recognition site for a first recombinase;
[0261] at least one functional ectopic nuclease null allele of a MF gene and at least one functional ectopic allele of a seed color gene (e.g., seed coat and/or seed endosperm gene) (or at least one functional ectopic allele of each member of a set of seed color genes) in either relative order;
[0262] a first recognition site for a second recombinase;
[0263] a selection gene;
[0264] a second recognition site for the first recombinase;
[0265] at least one functional ectopic nuclease-null allele of a PV gene;
[0266] a second recognition site for the second recombinase;
   is referred to herein as a “full cassette.” FIG. 31 provides exemplary embodiments of such a full cassette. As noted above, the full cassette can be provided in a number of possible configurations where all the recited elements are present. In particular, the above list of the elements of the construct can comprise a 5′ to 3′ order or a 3′ to 5′ order of the elements. It is specifically contemplated that the at least one functional ectopic nuclease null allele of a MF gene and at least one functional ectopic allele of a seed color gene (or at least one functional ectopic allele of each member of a set of seed color genes) can be in either 5′ to 3′ order relative to each other. A configuration is acceptable as long as:
[0267] the selection gene is located between a) the at least one functional ectopic nuclease-null allele of a PV gene and b) at least one functional ectopic nuclease null allele of a MF gene and at least one functional ectopic allele of a seed color gene (e.g., seed coat and/or seed endosperm gene) (or at least one functional ectopic allele of each member of a set of seed color genes); the first and second recognition sites for the first recombinase flank the at least one functional ectopic nuclease null allele of a MF gene, at least one functional ectopic allele of a seed color gene and the selection gene (or at least one functional ectopic allele of each member of a set of seed color genes);
[0268] the first and second recognition sites for the second recombinase flank the selection gene and the at least one functional ectopic nuclease-null allele of a PV gene.

[0269] The insertion can be efficiently selected for using the selection gene. As used herein, “selection gene” refers to a gene that confers a trait not endogenous to the plant/cell and which is readily selected for, e.g., herbicide or antibiotic resistance. Non-limiting examples of selection genes include nptII and nptII which confer resistance to kanamycin, beta-lactamase which confers resistance to certain penicillins like ampicillin, the ble genes that confers resistance to zeocin, the acetolactate synthase (ALS) gene (herbicide resistance, see e.g., Zong et al. Nature Plants 2019 5:480-5, which is incorporated by reference herein in its entirety), the acetyl-coenzyme A carboxylase gene, and the hygromycin resistance gene, More examples of resistance genes are also readily found in relevant databases, e.g, the Antibiotic Resistance Genes Database found at ardb.cbcb.umd.edu. In some embodiments of any of the aspects, the selection gene is nptII.

[0270] Once the full cassette is inserted into the genome, the resulting plant is referred to as a full-cassette insertion plant. It is contemplated herein that the plant could be a cell(s) of a plant and selection/screening/recombination occurs in cell culture. The full-cassette insertion plant can comprise the full-cassette in all somatic and germline cells (e.g., the plant is prepared or grown from a cell(s) comprising the full cassette), or the full-cassette insertion plant can comprise the full-cassette in at least some germline cells (e.g, if the cassette is introduced by Agrobacterium into cell in a flower). Two excising steps are then performed, respectively, on a first and second progeny of the full-cassette insertion plant. The progeny can be a plant descended from the full-cassette insertion plant, a cell(s) thereof, or a cell of the full-cassette insertion plant comprising the full-cassette.

[0271] The full cassette plant, first progeny, and second progeny can be heterozygous, hemizygous, or homozygous for the full cassette, depending on the methods utilized, the parameters of the screening, the propagation techniques utilized, and the number of generations separating the full-cassette insertion plant and the progeny. The first and second progeny are preferably genetically identical prior to the following excision steps and are differentiated by being physically separated and then subjected to different excision steps, rather than “first” and “second” implying any reference to, e.g., a first and second generation.

[0272] The first progeny is contacted with the first recombinase, which will cleave the genome at its first and second recognition sites, thereby excising the intervening sequence from the genome of the first progeny. That is, contacting the first progeny with the first recombinase will excise: one recognition site for the first recombinase, the at least one functional ectopic nuclease null allele of a MF gene and at least one functional ectopic allele of a seed color gene (e.g., seed coat and/or seed endosperm gene) (or at least one functional ectopic allele of each member of a set of seed color genes), the first recognition site for the second recombinase, and the selection gene from the genome of the first progeny. This excising step thereby provides an excised first progeny comprising: one recognition site for the first recombinase, the at least one functional ectopic nuclease-null allele of a PV gene, and the second recognition site for the second recombinase portions of the construct.

[0273] The second progeny is contacted with the second recombinase, which will cleave the genome at its first and second recognition sites, thereby excising the intervening sequence from the genome of the second progeny. That is, contacting the second progeny with the second recombinase will excise: one recognition site for the second recombinase, the selection gene, the second recognition site for the first recombinase and at least one functional ectopic nuclease-null allele of a PV gene. This excising step hereby provides an excised second progeny comprising: one recognition site for the second recombinase, the first recognition site for the first recombinase, and the at least one functional ectopic nuclease null allele of a MF gene and at least one functional ectopic allele of a seed color gene (e.g., seed coat and/or seed endosperm gene) (or at least one functional ectopic allele of each member of a set of seed color genes) portions of the construct.

[0274] After each of the excising steps, the first and second excised progeny can be selected by screening for the excision, e.g, by PCR screening. The excised first progeny and excised second progeny can be heterozygous, hemizygous, or homozygous for the excised cassette, depending on the methods utilized and the parameters of the screening.

[0275] The excised first progeny and excised second progeny are then crossed to produce a third progeny. The resulting third progeny comprises, in a first genome,
[0276] on a first chromosome of a pair of homologous chromosomes, at a single target locus, the at least one functional ectopic nuclease-null allele of a MF gene and the at least one functional ectopic allele of a seed color gene (e.g., seed coat and/or seed endosperm gene) (or at least one functional ectopic allele of each member of a set of seed color genes); and
[0277] on a second chromosome of the pair of homologous chromosomes, at the target locus corresponding to the target locus of the first chromosome of the pair of homologous chromosomes, the at least one functional ectopic nuclease-null allele of a PV gene.
   The third progeny (or a descendant or cell thereof) is mutated or engineered such that the endogenous MF genes at the native MF gene loci and the endogenous PV genes at the native PV gene loci are mutated or engineered to provide loss-of-function alleles. When all of the endogenous MF and PV alleles are mutated or engineered ot provide loss-of-function alleles, a male-fertile maintainer plant as described has been produced.

[0278] Alternatively, a male-fertile maintainer plant for a male-sterile polyploid plant can be prepared by a method comprising a first step of contacting a cell comprising a PV locus in a first chromosome and a second chromosome of a pair of homologous chromosomes in a first genome, with: 1) a site-specific guided nuclease (e.g., CRISPR); 2) one or more guide RNA sequences or multi-guide constructs specific to one or more sequences at the PV locus; and 3) a targeting insertion cassette comprising in 5′ to 3′ or 3′ to 5′ order: a first recognition site for a first recombinase and a second recognition site for the first recombinase; thereby providing a targeting insertion plant. In some embodiments of any of the aspects, the contacting of the first step comprises biolistic delivery or integration. The site-specific guided nuclease and guide sequences/constructs introduce the targeting insertion cassette into the PV locus. Selection of the guide sequence/constructs can provide a loss-of-function allele of the PV locus through the insertion of the targeting insertion cassette, or the insertion of the targeting insertion cassette may not interfere with the PV locus's expression or function. The targeting insertion plant is therefore available for targeted insertion of a desired second cassette by use of a recombinase that recognize's the targeting insertion cassette's recombinase sites. The insertion can be specific to the first genome, e.g., by selecting guide sequences/constructs specific to the sequence in a first genome, or can be made in multiple genomes and subject to later selection or engineering as described below.

[0279] In a second step, the targeting insertion plant, or first progeny of the targeting insertion plant, or a cell thereof is contacted with the first recombinase and a cassette comprising in 5′ to 3′ or 3′ to 5′ order: 1) a first recombination site for the first recombinase; 2) at least one functional ectopic nuclease null allele of a MF gene and at least one functional ectopic allele of a seed color gene (e.g., seed coat and/or seed endosperm gene) (or at least one functional ectopic allele of each member of a set of seed color genes) in either relative order; and 3) a second recombination site for the first recombinase; thereby providing a cassette insertion plant. The cassette insertion plant comprises the foregoing cassette inserted at at least one, and optionally, two alleles of the PV locus in the first genome. In some embodiments of any of the aspects, the contacting of the second step comprises transforming the plant, progeny, or cell thereof with one or more T-DNAs comprising the recombinase and cassette. In a third step, a cassette insertion plant comprising a cassette insertion at one allele of the PV locus is selected, or a cassette insertion plant comprising a cassette insertion at both alleles of the PV locus is crossed with a plant with a functional PV allele at the PV locus, thereby providing a cassette insertion plant with a cassette insertion at one PV allele in the first genome and a functional PV allele at the second PV allele in the first genome.

[0280] In a fourth step, the cassette insertion plant selected or provided by crossing in the third step, or a first progeny or cell thereof, is contacted with: 1) a site-specific guided nuclease (e.g., CRISPR); 2) one or more guide RNA sequences or multi-guide constructs flanking the insertion sites, thereby excising the inserted recombination sites; and 3) one or more guide RNA sequences or multi-guide constructs specific to the functional alleles of the endogenous MF gene and/or flanking the functional alleles of the endogenous MF gene, thereby mutating the functional alleles of the endogenous MF genes at the functional native MF gene loci to create loss-of-function alleles; thereby providing the male-fertile maintainer plant. In some embodiments of any of the aspects, the functional alleles of the MF gene comprise all alleles of the MF gene, e.g, two alleles in a diploid, four alleles in a tetraploid, or six alleles in a hexaploid. Accordingly, in some embodiments the fourth step comprises contacting the cassette insertion plant selected or provided by crossing in the third step, or a first progeny or cell thereof, with: 1) a site-specific guided nuclease (e.g., CRISPR); 2) one or more guide RNA sequences or multi-guide constructs flanking the insertion sites, thereby excising the inserted recombination sites; and 3) one or more guide RNA sequences or multi-guide constructs specific to the alleles of the endogenous MF gene and/or flanking the alleles of the endogenous MF gene, thereby mutating the alleles of the endogenous MF genes at the native MF gene loci to create loss-of-function alleles; thereby providing the male-fertile maintainer plant. For example, in some embodiments the fourth step comprises contacting the cassette insertion plant selected or provided by crossing in the third step, or a first progeny or cell thereof, with: 1) a site-specific guided nuclease (e.g., CRISPR); 2) one or more guide RNA sequences or multi-guide constructs flanking the insertion sites, thereby excising the inserted recombination sites; and 3) one or more guide RNA sequences or multi-guide constructs specific to all the alleles of the endogenous MF gene and/or flanking all the alleles of the endogenous MF gene, thereby mutating all the alleles of the endogenous MF genes at all the native MF gene loci to create loss-of-function alleles; thereby providing the potential for the male-fertile maintainer plant. In the latter embodiment, the inserted MF′ variant is not targeted by the one or more guide sequences because it has at least one SNP difference to the normal endogenous MF allele and so is not recognized for annealing/contacting by the guide. Exemplary MF′ alleles, e.g, Mfw2′ alleles are provided elsewhere herein.

[0281] In some embodiments of any of the aspects, the method further comprises a fifth step of segregating remaining T-DNA out of the plant or plant cells.

[0282] To create PV knock-out alleles as described herein, e.g., when the PV gene is endogenously expressed from the unmutated allele in the first genome and at least one further genome in the fourth step the plant, first progeny, or cell thereof can be further contacted with one or more guide RNA sequences or multi-guide constructs specific to the further genomes' endogenous PV genes and/or flanking the endogenous PV genes, thereby mutating the endogenous PV genes at the native PV gene loci of the further genomes to create loss-of-function alleles where they are not required for the hybrid system's allelic pair.

[0283] It is further contemplated herein that in some embodiments of any of the aspects, the MF gene is endogenously expressed from only some of the genomes. In such embodiments, it is not necessary to engineer loss of function alleles of the MF gene in the genomes which do not endogenously express the MF gene. For example, in some embodiments of any of the aspects, the MF gene is endogenously expressed only from the first genome. Unexpressed alleles can be hypermethylated alleles and/or alleles comprising a loss of function mutation. In such embodiments, it is not necessary to engineer loss of function alleles of the MF gene in the remaining genomes. For example, the MF gene can be Ms1, which is expressed only from the B genome of wheat. When the MF gene is Ms1, the gRNA sequences or constructs can be or comprise one or more of the three gRNA sequences of SEQ ID NOs: 253, 254, and 267. To create MF knock-out alleles as described herein, e.g., when the MF gene is endogenously expressed from the first genome and at least one further genome in the fourth step the plant, first progeny, or cell thereof can be further contacted with one or more guide RNA sequences or multi-guide constructs specific to the endogenous MF genes and/or flanking the endogenous MF genes, thereby mutating the endogenous MF genes at the native MF gene loci to create loss-of-function alleles.

[0284] In some embodiments of any of the aspects, the mutating or engineering to provide loss-of-function alleles can comprise one step, e.g, following by selection or screening. In some embodiments of any of the aspects, the selection or screening can comprise PCR screening for the desired excision. In some embodiments of any of the aspects, the mutating or engineering to provide loss-of-function alleles can comprise multiple steps, until all of the alleles are mutated or engineered. In some embodiments of any of the aspects, the loss-of-function alleles are caused by contacting the genome with a site-specific guided nuclease (e.g., CRISPR) and one or more guide RNA sequences or multi-guide constructs.

[0285] It is contemplated that the inserting and excision steps can be performed sequentially or concurrently. It is contemplated that the excision and the mutating/engineering steps can be performed sequentially or concurrently.

[0286] In some embodiments of any of the aspects, male-sterile plants can also be provided, produced, selected, or identified during the mutating or engineering of the third progeny. As illustrated in Example 9, when the first and second progeny are hemizygous, some of the third progeny will be heterzogyous MF′:seed color/PV′ and after the mutating or engineering to produce knockout or loss-of-function alleles of the endogenous MF and PV alleles, will be the maintainer plants as described herein. However, some of the progeny will be homozygous null for the insert or hemizygous PV′/− and after the mutating or engineering to produce knockout or loss-of-function alleles of the endogenous MF and PV alleles, will be the male-sterile plants as described herein.

[0287] A “recombinase,” as used herein, is a site-specific enzyme that recognizes short DNA sequence(s), which sequence(s) are typically between about 30 base pairs (bp) and 40 bp, and that mediates the recombination between these recombinase recognition sequences, which results in the excision, integration, inversion, or exchange of DNA fragments between the recombinase recognition sequences.

[0288] The outcome of the recombination reaction mediated by a recombinase depends, in part, on the location and orientation of two short repeated DNA sequences (e.g., RRS) that are to be recombined, typically less than 30 bp long. Recombinases bind to these repeated sequences, which are specific to each recombinase, and are herein referred to as “recombinase recognition sequences” or “recombinase recognition sites” or “RRS”. Thus, as used herein, a recombinase is “specific for” a recombinase recognition site when the recombinase can mediate inversion or excision between the repeat DNA sequences. As used herein, a recombinase may also be said to recognize its “cognate recombinase recognition sites,” which flank an intervening genetic element (e.g., a gene or genes). A genetic element is said to be “flanked” by recombinase recognition sites when the element is located between and immediately adjacent to two repeated DNA sequences.

[0289] In some embodiments of any of the aspects, the first and second recognition for a recombinase are provided or are in the same orientation, such that excision rather than inversion is performed by the recombinase.

[0290] The first and second recombinases are recombinases that recognized and cause recombination at different recognition sites. The first and second recombinases can be related, but must not utilize each other's recognition sites. Numerous recombinases and their cognate recognition sites are known in the art. Exemplary recombinases for use in the methods and compositions as described herein, include, but are not limited to, Flp, Dre, SCre, VCre, Vika, B2, B3, KD, ΦC31, Bxb1, λ, HK022, HP1, γδ, ParA, Tn3, Gin, R4, TP901-1, TG1, PhiRvl, PhiBT1, SprA, XisF, TnpX, R, BxB1, A118, spoIVCA, PhiMR11, SCCmec, TndX, XerC, XerD, XisA, Hin, Cin, mrpA, beta, PhiFC1, Fre, Clp, sTre, FimE, and HbiF. In some embodiments of any of the aspects, the recombinase is a tyrosine recombinase. In some embodiments of any of the aspects, the tyrosine recombinase is Cre, VCre, SCre, Flippase (Flp) XerA, XerC, or XerD. In some embodiments of any of the aspects, the first and second recombinase are Cre and Flp, or Flp and Cre respectively.

[0291] The sequences of recombinases and their recognition sites are well known in the art, for example, VCre's amino acid sequence is available in Genbank as ABX77110.1 and SCre's amino acid sequence is available in Genbank as ABK50591.1. Further discussion of VCre and SCre can be found, e.g., in Suzuki. Nucleic Acids Res 2011 39:e49; which is incorporated by reference herein in its entirey.

[0292] In any of the methods described herein, casettes, constructs, and genes can be introduced or inserted by any method known in the art, e.g., biolistic delivery, or vector delivery (e.g., viral vectors or T-DNA vectors). Methods of transforming plants/plant cells are well known in the art. In some embodiments of any of the aspects, contacting a plant/cell with a cassette/construct/or gene(s) comprises contacting the plant/plant cell(s) with a viral vector comprising the cassette/construct/gene(s). In some embodiments of any of the aspects, contacting a plant/cell with a cassette/construct/or gene(s) comprises contacting the plant/plant cell(s) with a T-DNA vector comprising the cassette/construct/gene(s). In some embodiments of any of the aspects, introducing or inserting a cassette/construct/or gene(s) into a plant/plant cell comprises contacting the plant/plant cell(s) with a viral vector comprising the cassette/construct/gene(s). In some embodiments of any of the aspects, introducing or inserting a cassette/construct/or gene(s) into a plant/plant cell comprises contacting the plant/plant cell(s) with a T-DNA vector comprising the cassette/construct/gene(s).

[0293] In any of the aspects of the methods described herein contacting the plant/plant cell(s) with a recombinase can comprise contacting the plant/plant cell(s) with a recombinase polypeptide, or with a nucleic acid (e.g., a vector) encoding the recombinase. In any of the aspects of the methods described herein contacting the plant/plant cell(s) with a recombinase can comprise introducing into the plant/plant cell(s) a recombinase polypeptide, or a nucleic acid (e.g., a vector) encoding the recombinase. In embodiments relating to a nucleic acid (e.g., a vector) encoding the recombinase, a step of removing or selecting out the nucleic acid encoding the recombinase after the relevant excision step.

[0294] Introducing, contacting, or inserting a polypeptide or nucleic acid can comprise transformation, transduction, and/or transfection according to any method known in the art.

[0295] In one aspect of any of the embodiments, described herein is a male-sterile plant or maintainer plant (or seed thereof), obtained by a method described herein.

[0296] In one aspect of any of the embodiments, described herein is a method of providing a male sterile plant seed, the method comprising selecting, from seed produced by selfing a maintainer plant as described herein, seed not displaying a phenotype provided by the seed endosperm gene. The selecting can be done manually or by a machine or device, e.g., a device that can sort based on seed color. Such devices are known in the art and suitable exemplary thresholds and sorting mechanisms are described in the examples herein. In one aspect of any of the embodiments, described herein is a method of providing male sterile plant seed, the method comprising selfing a maintainer plant as described herein, whereby the resulting seed not displaying a phenotype provided by the seed endosperm gene is the male sterile plant seed. Selfing a maintainer plant can include, but is not limited to, growing the maintainer plant under circumstances where cross-pollination with pollination-capable plants that are not maintainer plants is not likely to occur and/or will not occur, e.g., growing the maintainer plant in a greenhouse or other controlled environment lacking pollination-capable plants that are not maintainer plants, growing the maintainer plant in a field where pollination-capable plants that are not maintainer plants are not within pollination range (this will vary depending on e.g., the identity of the plant, local environmental conditions, and the existence and characteristics of intervening plants or structures and can readily be determined by one of ordinary skill in the art for an individual set of conditions), or growing the maintainer plant in or partially inside a device that isolates the reproductive portions of the plant and prevents or reduces cross-pollination (e.g., a pollination bag).

[0297] In one aspect of any of the embodiments, described herein is a method of providing a F1 hybrid seed for crop production, the method comprising collecting the seed produced by a male-sterile plant pollinated by a male-fertile plant, wherein the male-sterile plant is a) a plant grown from male sterile plant seed obtained by the method described herein; and/or b) comprises: i) loss-of-function alleles of an endogenous MF gene at each of the native MF gene loci; ii) loss-of-function alleles of an endogenous PV gene at each of the native PV gene loci; and iii) two ectopic alleles of the PV gene at a target locus. In one aspect of any of the embodiments, described herein is a method of providing a F1 hybrid seed for crop production, the method comprising crossing a a male-sterile plant with a male-fertile plant, wherein the male-sterile plant is a) a plant grown from male sterile plant seed obtained by the method described herein; and/or b) comprises: i) loss-of-function alleles of an endogenous MF gene at each of the native MF gene loci; ii) loss-of-function alleles of an endogenous PV gene at each of the native PV gene loci; and iii) two ectopic alleles of the PV gene at a target locus. In one aspect of any of the embodiments, described herein is a method of providing a F1 hybrid seed for crop production, the method comprising planting a male-sterile plant within pollination range of a male-fertile plant, wherein the male-sterile plant is a) a plant grown from male sterile plant seed obtained by a method described herein; and/or b) comprises: i) loss-of-function alleles of an endogenous MF gene at each of the native MF gene loci; ii) loss-of-function alleles of an endogenous PV gene at each of the native PV gene loci; and iii) two ectopic alleles of the PV gene at a target locus; and whereby the male-fertile plant pollinates the male-sterile plant and F1 hybrid seed is produced. As described above, the pollination range will vary depending on the species of plant and the growing conditions. One of ordinary skill in the art can determine the pollination range for a selected species and site. In some embodiments of any of the aspects, the pollination range of wheat is 200 meteres or less. In some embodiments of any of the aspects, the pollination range of wheat is 100 meteres or less. In some embodiments of any of the aspects, the pollination range of wheat is 50 meteres or less. In some embodiments of any of the aspects, the pollination range of wheat is 300 meteres or less. In some embodiments of any of the aspects, the pollination range of wheat is 400 meteres or less. In some embodiments of any of the aspects, the male-sterile plant and male fertile plant are different lines. In some embodiments of any of the aspects, the male-sterile plant and male fertile plant are different elite lines.

[0298] In one aspect of any of the embodiments, described herein is a method of producing a plant crop (e.g., a commodity or cash crop, or a crop for consumption, or a crop for industrial use and not for use as planting seed), the method comprising: a) planting and/or harvesting a plant or portion thereof, wherein the plant i) is plant grown from F1 hybrid seed obtained by a method described herein; and/or ii) comprises: 1) in each genome of the plant, at a native MF gene locus, one functional endogenous allele of the endogenous MF gene and one loss-of-function allele of the endogenous MF gene; 2) in each genome of the plant, at a native PV gene locus, one functional endogenous allele of the endogenous PV gene and one loss-of-function allele of the endogenous PV gene; 3) one ectopic allele of the PV gene at a target locus.

[0299] The engineered alleles described herein can be engineered by any single methodology or technology known in the art (which are described elsewhere herein) or a combination of any of those methodologies or technologies. In some embodiments of any of the apects, the method comprises engineering one or more modifications, e.g., by contacting a plant cell with a site-specific guided nuclease. In some embodiments of any of the apects, the method comprises engineering one or more modifications, e.g., by contacting a plant cell with a site-specific guided nuclease and at least one multi-guide construct. In some embodiments of any of the apects, step b, c, or d of the foregoing method comprises a single step of contacting a plant cell with a site-specific guided nuclease (e.g., a Cas enzyme) and one or more multi-guide constructs that target each allele of a MF and/or PV gene in the indicated genomes.

[0300] In one aspect of any of the embodiments, provided herein is a method of producing a male-fertile maintainer plant comprising nuclease-null (e.g., CRISPR-null) MF and PV alleles as described herein in a second plant line, wherein the method comprises:
[0301] a. crossing an extant male-fertile maintainer plant of a first line with a second plant of a second line to obtain a F1 generation, wherein the extant male-fertile maintainer plant comprises the alleles and/or modifications described herein;
[0302] b. selfing the F1 plant to obtain a F2 generation,
[0303] c. selecting for a plant or seed in the F2 generation with the greatest degree of conformity with the second line (e.g., by genetic sequence (e.g., SNPs) or by phenotype) and comprising the ectopic alleles and/or seed endosperm genes of the male-fertile maintainer plant as described herein;
[0304] d. optionally, backcrossing the plant selected in step b with the second line to obtain a further generation and then repeating the selection in the further generation as above,
[0305] e. optionally, repeating step d iteratively.

[0306] In one aspect of any of the embodiments, provided herein is a method of producing a male-fertile maintainer plant comprising nuclease-null (e.g., CRISPR-null) MF and PV alleles as described herein in a second plant line, wherein the method comprises:
[0307] a. crossing an extant male-fertile maintainer plant of a first line with a second plant of a second line to obtain a F1 generation, wherein the extant male-fertile maintainer plant comprises the alleles and/or modifications described herein;
[0308] b. selfing the F1 plant to obtain a F2 generation, selecting for a plant or seed in the F2 generation with the greatest degree of conformity with the second line (e.g., by genetic sequence (e.g., SNPs) or by phenotype) and comprising the ectopic alleles and/or seed endosperm genes of the male-fertile maintainer plant as described herein;
[0309] c. optionally, backcrossing the plant selected in step b with plant of the second line to obtain a further generation and then repeating the selection in the further generation as above,
[0310] d. optionally, repeating step c iteratively,
[0311] e. engineering:
   [0312] loss-of-function alleles in/at each native or endogenous allele of a MF gene in the second and any subsequent genomes, and at the allele on the second chromosome of the homologous pair in the first genome; and loss-of-function alleles in/at each native allele of a PV gene in all genomes.

[0313] In some embodiments of any of the aspects, each step of engineering a loss-of-function allele utilizes a guided nuclease (e.g., Cas9) and one, two, three, or more targeted sequences per gene. In some embodiments of any of the aspects, each step of engineering a loss-of-function allele utilizes a targeted nuclease (e.g., Cas9) and three targeted sequences per gene. In some embodiments of any of the aspects, the step of engineering a loss-of-function allele in the MF and PV genes in the indicated genomes comprises concurrent or simultaneous knock-out modifications generated by contacting a cell with a guided nuclease (e.g., Cas9) and three guide RNA sequences for each target, e.g., six guide RNA sequences total.

[0314] Selection and screening of plants which comprise the engineered alleles or modification(s) and/or progeny which comprise a combination of engineered alleles or modifications can be performed by any method known in the art, e.g., by phenotype screening or selection, genetic analysis (e.g. PCR or sequencing to detect the modifications), analysis of gene expression products, and the like. In some embodiments of any of the aspects, PCR screening can comprise PCR utilizing KASP primers. Such methods are known to one of skill in the art and can be used in any combination as desired. In some embodiments of any of the aspects, the engineered modifications do not comprise introduction of an exogenous marker gene (e.g., a selectable marker or screenable marker such as herbicide resistance or fluorsence or color-altering genes), and any selection or screening step does not rely upon the use of a selectable marker gene.

[0315] In one aspect of any of the embodiments, provided herein is a method of propagating a male-fertile maintainer plant as described herein, wherein the method comprises:
[0316] a. Permitting a male-fertile maintainer plant as described herein to self-fertilize;
[0317] b. Sorting the seed resulting from the self-fertilization to retain the seed expressing the seed endosperm gene's phenotype (e.g., the color produced by the seed endosperm gene's expression).

[0318] With homozygous MF′ being impossible due to pollen grains incorporating MF′ having no PV allele vital for pollen germination, the sorted seed (incorporating, e.g., BA with MF′) resulting from this method will have the same heterozygous genotype (e.g., MF′:BA/PV′) as the parental male-fertile maintainer plant (e.g, the plant that self-fertilized in step a).

[0319] In one aspect of any of the embodiments, provided herein is a method of propagating a male-sterile plant as described herein (e.g., having a mfiv×3, PV′/PV′, pv×3 genotype or a mf vx2, mfwv:PV pv×3 genotype) wherein the method comprises:
[0320] a. Permitting a male-fertile maintainer plant as described herein to pollinate the male-sterile plant;
[0321] b. collecting the seed produced by the male-sterile plant.

[0322] The seed resulting from this method will have the same genotype as the male-sterile parent plant (e.g. the male-sterile plant pollinated in step a).

[0323] In one aspect of any of the embodiments, provided herein is a method of producing F1 crop seed, the method comprising:
[0324] c. Permitting a male-fertile breeding line (e.g., an elite breeding line) to pollinate a male-sterile plant as described herein (e.g., having a mfv×3, PV′/PV′, pv×3 genotype or a mf vx2 mfw:PV pv×3 genotype);
[0325] d. collecting the seed produced by the male-sterile plant.
   The seed resulting from this method will be F1 seed.

[0326] In some embodiments of any of the aspects, a loss-of-function allele can comprise a “deactivating modification.” The phrase “deactivating modification” refers to a modification of an individual nucleic acid sequence and/or copy of a gene, resulting in deactivation of the allele. In some embodiments, deactivating modifications at all alleles of a given gene may be necessary to deactivate the gene. Furthermore, it is contemplated herein that the deactivating modification found at any given copy of a gene may or may not be identical to the deactivating modification found at the remaining copies of that gene. In some embodiments of any of the aspects, a knock-out or nonfunctional allele of a gene can comprise a deactivating modification at that allele.

[0327] As used herein, a “deactivated” gene is one that, due to engineering and/or modification of the genome (both chromosomal and/or extrachromosomal) of the cell in which the gene is found, is expressed at less than 35% of the wild-type level of functional polypeptide. In some embodiments of any of the aspects, a deactivated gene is expressed at less than 30% of the wild-type level of functional polypeptide. In some embodiments of any of the aspects, a deactivated gene is expressed at less than 25% of the wild-type level of functional polypeptide. In some embodiments of any of the aspects, a deactivated gene is expressed at less than 20% of the wild-type level of functional polypeptide. In some embodiments of any of the aspects, a deactivated gene is expressed at less than 15% of the wild-type level of functional polypeptide.

[0328] The wild-type level of functional polypeptide can be the level of functional polypeptide found in the same type of cell not comprising the modification. In some embodiments of any of the aspects, the level of functional polypeptide can be the level of full-length polypeptide with a wild-type sequence.

[0329] In some embodiments of any of the aspects, deactivation of a gene can comprise engineering, modifying, and/or altering the genome of the cell in which the gene is found such that the cell expresses no more than 35% of the wild-type level of the polypeptide, inclusive of both full-length and partial sequences of the gene. In some embodiments of any of the aspects, a deactivated gene is expressed at less than 30% of the wild-type level of polypeptide, inclusive of both full-length and partial sequences of the gene. In some embodiments of any of the aspects, a deactivated gene is expressed at less than 25% of the wild-type level of polypeptide, inclusive of both full-length and partial sequences of the gene. In some embodiments of any of the aspects, a deactivated gene is expressed at less than 20% of the wild-type level of polypeptide, inclusive of both full-length and partial sequences of the gene. In some embodiments of any of the aspects, a deactivated gene is expressed at less than 15% of the wild-type level of polypeptide, inclusive of both full-length and partial sequences of the gene.

[0330] In some embodiments of any of the aspects, deactivation of a gene can comprise engineering, modifying, and/or altering the genome of the cell in which the gene is found such that the cell expresses polypeptides comprising no more than 35% of the wild-type sequence of the polypeptide. In some embodiments of any of the aspects, deactivation of a gene can comprise engineering, modifying, and/or altering the genome of the cell in which the gene is found such that the cell expresses polypeptides comprising no more than 30% of the wild-type sequence of the polypeptide. In some embodiments of any of the aspects, deactivation of a gene can comprise engineering, modifying, and/or altering the genome of the cell in which the gene is found such that the cell expresses polypeptides comprising no more than 25% of the wild-type sequence of the polypeptide. In some embodiments of any of the aspects, deactivation of a gene can comprise engineering, modifying, and/or altering the genome of the cell in which the gene is found such that the cell expresses polypeptides comprising no more than 20% of the wild-type sequence of the polypeptide. In some embodiments of any of the aspects, deactivation of a gene can comprise engineering, modifying, and/or altering the genome of the cell in which the gene is found such that the cell expresses polypeptides comprising no more than 15% of the wild-type sequence of the polypeptide. In some embodiments of any of the aspects, deactivation of a gene can comprise engineering, modifying, and/or altering the genome of the cell in which the gene is found such that the cell expresses polypeptides comprising no more than 10% of the wild-type sequence of the polypeptide.

[0331] The whole wheat genome has previously been sequenced and published. Sequences are given in International Wheat Genome Sequencing Consortium (IWGSC) TIWGSC, IWGSC RefSeq principal investigators: R, Appels R, Eversole K, Feuillet C, Keller B, et al. Shifting the limits in wheat research and breeding using a fully annotated reference genome. Science. American Association for the Advancement of Science; 2018; 361:eaar7191; Chapman et al (2014) and Clavijo et al, (2016) and were downloadable from, e.g., TGAC, The Genome Analysis Centre, Norwich in January 2016 and subsequently published in October 2016 as part of Clavijo et al., 2016. (available on the world wide web at ftp.ensemblgenomes.org/pub/plants/pre/fasta/triticum_aestivum/dna/). In the case of wheat, selecting sequences of targeted genes for use in the present invention, suitable coding sequences can be selected from Appels et al. (2018), Clavijo et al, (2016), Chapman et al (2014) or TGAC (or any other academic publication).

[0332] In some embodiments, alleles may be deactivated by editing or deleting their associated promoter sequences or inserting a premature stop codon so that it no longer fulfils its function (‘gene knockout’). A variety of general methods are known for such gene editing. Such editing may involve additions to or deletions from the gene coding sequence or from control (regulatory) sequences upstream or downstream of the coding sequence, but in any case is such as to inhibit production of functional RNA transcript. For example, a gene might be knocked out by inserting one or more additional base pairs of DNA resulting in coding for one or more unsuitable amino-acids, or by creating a premature stop codon so as to substantially shorten the resulting RNA transcript. In some embodiments of any of the aspects, such “gene editing” modifications comprise only deletion of DNA base sequence and not insertion of exogenous sequence. Such editing by deletion, because it contains no additional or heterogenous DNA, is often regarded as environmentally safer and so may require less extensive, and hence less expensive and time-consuming, regulation. Accordingly, in some embodiments of any of the aspects, a deactivating modification can be a modification that interrupts and/or alters the wild-type coding sequence of the gene, e.g., by deletions which generate a stop codon, transposon, deletion, or frameshift in the coding sequence of the gene. Methods of performing such modifications are described elsewhere herein.

[0333] In some embodiments of any of the aspects, engineered modifications, including deactivating modifications, can be introduced by means of a mutagen, e.g., ethyl methane sulphonate (EMS), radiation, UV light, aflatoxin B1, nitrosoguanidine (NG), formaldehyde, acetaldehyde, diepoxyoctane (DEO), depoxybutane (DEB), diethyl sulphate (DES), methylnitrontrosoguanidine (NTG), N-ethyl-N-nitrosourea (ENU), and trimethylpsoralen (TMP). In some embodiments of any of the aspects, engineered modifications can be introduced, selected, and/or identified by means of TILLING (Targeted Induced Local Lesions IN Genomes) which uses mutagens to generate mutations. TILLING is described in detail, e.g., in Kurowska et al. J Appl Genet 2011 52:371-390 and McCallum et al. Plant Physiol 2000 123:439-442, which are incorporated by reference herein in their entireties.

[0334] In some embodiments of any of the aspects, engineered modifications can be introduced by non-transgenic mutagenesis, e.g., by a method which causes mutations of the nucleic acid sequences of the plant genome without introducing foreign and/or exogenous nucleic acid molecules into the plant cell. In some embodiments of any of the aspects, non-transgenic mutagenesis can comprise insertions and/or deletions due to mutagenic activity, e.g., indels arising from damage and/or repair processes in the cell. Non-transgenic mutagenesis can utilize, e.g., chemical mutagens (e.g., mutagens not comprising a nucleic acid sequence) and/or radiation sources (e.g., UV light). Non-transgenic mutagenesis excludes the use of, e.g., transposon insertions and/or RNAi. In some embodiments of any of the aspects, non-transgenic mutagenesis does not comprise the use of a site-specific nuclease, e.g., CRISPR-Cas. In some embodiments of any of the aspects, non-transgenic mutagenesis can be used in, e.g., TILLING approaches to generate and/or identify engineered modifications.

[0335] In some embodiments of any of the aspects, the engineered modification is not a naturally occurring modification, mutation, and/or allele.

[0336] In some embodiments of any of the aspects, the deactivating modification is excision of at least part of a coding or regulatory sequence; or the deactivated gene is deactivated by excision of at least part of a coding or regulatory sequence. In some embodiments of any of the aspects, the deactivating modification is non-transgenic mutagenesis; or the deactivated gene is deactivated by non-transgenic mutagenesis.

[0337] In some embodiments of any of the aspects, genes can be deactivated by utilizing a CRISPR/Cas system to introduce deactivating mutations at these loci. For example, PV1 can be targeted with four guide RNAs for each of the three sets of homoeologues and exemplary sets of such guide sequences are provided herein, e.g., guides having the sequences of SEQ ID Nos:210-213 can be used to target PV1. Exemplary guide sequences for targeting MF and PV alleles are described herein. Exemplary guide sequences for targeting Mfw alleles (either for knock-outs or simultaneous knockout/knock-ins) can also be found in International Patent Application PCT/US2017/043009, e.g., as SEQ ID NOs; 22-29 and 131-154 therein. A further exemplary guide sequence for targeting Mfw2 is SEQ ID NO: 238. The contents of International Patent Application PCT/US2017/043009 are incorporated by reference herein in their entirety.

PV1 guides (the fourth guide is in the reverse direction relative to the coding sequence)

SEQ ID NO: 210
GCATGGCGGAGCCGGAGGACGG
SEQ ID NO: 211
GTCGCCCCTCCTGAGGCGGCGG
SEQ ID NO: 212
AAGGAGGAGCCGGCGGCAGCGG
SEQ ID NO: 213
GAGACCGCCTCGCCGGAGCCGG

[0338] In some embodiments of any of the aspects, the deactivating modification is a site-directed mutagenic event resulting from the activity of a site-specific nuclease; or the at least one gene is deactivated by site-directed mutagenesis resulting from the activity of a site-specific nuclease. In some embodiments of any of the aspects, the site-specific nuclease is CRISPR-Cas.

[0339] In order for a gene to be deactivated, it is necessary to reduce the expression from multiple alleles or copies, e.g., wheat is a hexaploid genome and it may be necessary to reduce expression from all six copies of a given gene. Accordingly, in some embodiments of any of the aspects, a deactivating modification is present at all six copies of a given deactivated gene. The individual deactivating modifications can be identical or they can vary.

[0340] In some embodiments of any of the aspects, the deactivation of a first gene can further comprise deactivation of one or more further related genes which display functional redundancy with the first gene. In some embodiments of any of the aspects, a plant or cell in which a given gene is deactivated can comprise deactivating modification(s) that deactivate all members of that gene's family. In some embodiments of any of the aspects, a plant or cell in which a given gene is deactivated can comprise deactivating modification(s) that deactivate all genes with at least 30% sequence identity at the amino acid level to the gene. In some embodiments of any of the aspects, a plant or cell in which a given gene is deactivated can comprise deactivating modification(s) that deactivate all genes with at least 40% sequence identity at the amino acid level to the gene. In some embodiments of any of the aspects, a plant or cell in which a given gene is deactivated can comprise deactivating modification(s) that deactivate all genes with at least 50% sequence identity at the amino acid level to the gene. In some embodiments of any of the aspects, a plant or cell in which a given gene is deactivated can comprise deactivating modification(s) that deactivate all genes with at least 60% sequence identity at the amino acid level to the gene. In some embodiments of any of the aspects, a plant or cell in which a given gene is deactivated can comprise deactivating modification(s) that deactivate all genes with at least 70% sequence identity at the amino acid level to the gene. In some embodiments of any of the aspects, a plant or cell in which a given gene is deactivated can comprise deactivating modification(s) that deactivate all genes with at least 80% sequence identity at the amino acid level to the gene. In some embodiments of any of the aspects, a plant or cell in which a given gene is deactivated can comprise deactivating modification(s) that deactivate all genes with at least 90% sequence identity at the amino acid level to the gene.

[0341] In some embodiments of any of the aspects, a plant or cell in which a given gene is deactivated can comprise deactivating modification(s) that deactivate all genes with at least 30% sequence identity at the nucleotide level to the gene. In some embodiments of any of the aspects, a plant or cell in which a given gene is deactivated can comprise deactivating modification(s) that deactivate all genes with at least 40% sequence identity at the nucleotide level to the gene. In some embodiments of any of the aspects, a plant or cell in which a given gene is deactivated can comprise deactivating modification(s) that deactivate all genes with at least 50% sequence identity at the nucleotide level to the gene. In some embodiments of any of the aspects, a plant or cell in which a given gene is deactivated can comprise deactivating modification(s) that deactivate all genes with at least 60% sequence identity at the nucleotide level to the gene. In some embodiments of any of the aspects, a plant or cell in which a given gene is deactivated can comprise deactivating modification(s) that deactivate all genes with at least 70% sequence identity at the nucleotide level to the gene. In some embodiments of any of the aspects, a plant or cell in which a given gene is deactivated can comprise deactivating modification(s) that deactivate all genes with at least 80% sequence identity at the nucleotide level to the gene. In some embodiments of any of the aspects, a plant or cell in which a given gene is deactivated can comprise deactivating modification(s) that deactivate all genes with at least 90% sequence identity at the nucleotide level to the gene.

[0342] It is contemplated herein that such further related gene(s) can be deactivated by the same type of modification (e.g., the first gene is deactivated by modifying the gene with CRISPR/Cas and the further related gene(s) are deactivated by modifying the further related genes(s) with CRISPR/Cas); with the same modification step (e.g., the first gene is deactivated by modifying the gene with CRISPR/Cas and the further related gene(s) are simultaneously deactivated by modifying the further related genes(s) with the same CRISPR/Cas array, wherein the array targets sequences shared between the first and further genes); or by separate types of modifications.

[0343] In embodiments where multiple genes are to be deactivated, e.g., multiple members of a gene family, deactivating modifications can be targeted to shared sequences to minimize the number of modifications and/or individual reagents. Alternatively, deactivating modifications can be targeted to areas that are unique to each gene and a multiplexed approach can be taken. By way of non-limiting example, a gene family can be deactivated utilizing a single CRISPR sgRNA (or equivalent) if the sgRNA is targeted to a sequence found in all members of the gene family; or the gene family can be deactivated utilizing multiple CRISPR sgRNAs (or equivalents) if the sgRNAs are each targeted to sequences not found in each member of the gene family.

[0344] In some embodiments of any of the aspects, the engineered modifications described herein can be made directly in an elite breeding line. In some embodiments of any of the aspects, the engineered modifications described herein can be made in a first line or cultivar and then transferred to elite standard lines by traditional or ‘conventional’ crossing and selection.

[0345] For convenience, the meaning of some terms and phrases used in the specification, examples, and appended claims, are provided below. Unless stated otherwise, or implicit from context, the following terms and phrases include the meanings provided below. The definitions are provided to aid in describing particular embodiments, and are not intended to limit the claimed invention, because the scope of the invention is limited only by the claims. Unless otherwise defined, all technical and scientific terms used herein have the same meaning as commonly understood by one of ordinary skill in the art to which this invention belongs. If there is an apparent discrepancy between the usage of a term in the art and its definition provided herein, the definition provided within the specification shall prevail.

[0346] For convenience, certain terms employed herein, in the specification, examples and appended claims are collected here.

[0347] As used herein, a first plant which is a “maintainer” of a second male-sterile plant is a plant which is itself male-fertile but which when permitted to fertilize the male-sterile plant, will result in male-sterile plants in the next generation.

[0348] As used herein, a plant which is “male-sterile” is a plant in which less than 1% of pollen grains are viable, e.g., in which there are no detectable viable pollen grains. This is distinguished from uses in the art in which plants are referred to as male-sterile when they only have reduced male fertility, but still produce significant amounts of viable pollen and exhibit substantial rates of seed set. In some embodiments of any of the aspects, a male-sterile plant described herein is “stringently male-sterile”, i.e., no viable pollen grains can be detected and/or no seed set from natural self-fertilization is observed. In some embodiments of any of the aspects, a stringently male-sterile wheat gene is selected from the group consisting of Mfw1, Mfw2, and PV1. In some embodiments of any of the aspects, a plant which is “male-sterile” is not photo or thermo sensitive in its male-sterility. That is, the male-sterile phenotype is not dependent on light or temperature levels or changes. In some embodiments of any of the aspects, a “male-sterile” plant is one in which less than 1% of pollen grains are viable regardless of changes in light or temperature. In some embodiments of any of the aspects, a “male-sterile” plant is one in which less than 1% of pollen grains are viable regardless of changes in light or temperature that are within the range of light and temperature levels that permit growth and viable pollen production in a plant that is isogenic except for the MF mutation(s) that convey male sterility.

[0349] Plants can be polyploid, e.g., they contain multiple genomes. Accordingly, the plants and plant cells are described herein with reference to a first genome and further genomes (e.g., a second genome, a third genome, etc). When engineering the plants/cells described herein, the selection or designation of one genome as the first genome is at the discretion of the user. That is, there is not an inherent feature of one of the genomes that designates it as the “first” genome. Each genome comprises pairs of homologous chromosomes. When engineering the plants/cells described herein, the selection or designation of one chromosome of a pair of homologous chromosomes as the first member of the pair is at the discretion of the user. That is, there is not an inherent feature of one of the chromosomes that designates it as the “first” chromosome.

[0350] As used herein, “locus” refers to a fixed position on a chromosome, e.g., the location of a gene or marker and its immediately neighbouring sequence on a chromosome as it exists prior to engineering or modification. Thus, reference to a “MF locus” refers to the physical position of a given MF gene on a particular chromosome prior to any engineering or modification.

[0351] As used herein, “allele” refers to an individual copy of a gene. In a diploid organism, two alleles of a gene are typically present in the genome and the two alleles may not have identical sequences. Multiple different alleles can be present in a single organism, in a single population, or a single species.

[0352] The terms “decrease”, “reduced”, “reduction”, or “inhibit” are all used herein to mean a decrease by a statistically significant amount. In some embodiments, “reduce,” “reduction” or “decrease” or “inhibit” typically means a decrease by at least 10% as compared to a reference level (e.g. the absence of a given element or agent) and can include, for example, a decrease by at least about 10%, at least about 20%, at least about 25%, at least about 30%, at least about 35%, at least about 40%, at least about 45%, at least about 50%, at least about 55%, at least about 60%, at least about 65%, at least about 70%, at least about 75%, at least about 80%, at least about 85%, at least about 90%, at least about 95%, at least about 98%, at least about 99%, or more. As used herein, “reduction” or “inhibition” does not encompass a complete inhibition or reduction as compared to a reference level. “Complete inhibition” is a 100% inhibition as compared to a reference level.

[0353] The terms “increased”, “increase”, “enhance”, or “activate” are all used herein to mean an increase by a statistically significant amount. In some embodiments, the terms “increased”, “increase”, “enhance”, or “activate” can mean an increase of at least 10% as compared to a reference level, for example an increase of at least about 20%, or at least about 30%, or at least about 40%, or at least about 50%, or at least about 60%, or at least about 70%, or at least about 80%, or at least about 90% or up to and including a 100% increase or any increase between 10-100% as compared to a reference level, or at least about a 2-fold, or at least about a 3-fold, or at least about a 4-fold, or at least about a 5-fold or at least about a 10-fold increase, or any increase between 2-fold and 10-fold or greater as compared to a reference level. In the context of a marker, an “increase” is a statistically significant increase in such level.

[0354] As used herein, the terms “protein” and “polypeptide” are used interchangeably herein to designate a series of amino acid residues, connected to each other by peptide bonds between the alpha-amino and carboxy groups of adjacent residues. The terms “protein”, and “polypeptide” refer to a polymer of amino acids, including modified amino acids (e.g., phosphorylated, glycated, glycosylated, etc.) and amino acid analogs, regardless of its size or function. “Protein” and “polypeptide” are often used in reference to relatively large polypeptides, whereas the term “peptide” is often used in reference to small polypeptides, but usage of these terms in the art overlaps. The terms “protein” and “polypeptide” are used interchangeably herein when referring to a gene product and fragments thereof. Thus, exemplary polypeptides or proteins include gene products, naturally occurring proteins, homologs, orthologs, paralogs, fragments and other equivalents, variants, fragments, and analogs of the foregoing.

[0355] In the various embodiments described herein, it is further contemplated that variants (naturally occurring or otherwise), alleles, homologs, conservatively modified variants, and/or conservative substitution variants of any of the particular polypeptides described are encompassed. As to amino acid sequences, one of skill will recognize that individual substitutions, deletions or additions to a nucleic acid, peptide, polypeptide, or protein sequence which alters a single amino acid or a small percentage of amino acids in the encoded sequence is a “conservatively modified variant” where the alteration results in the substitution of an amino acid with a chemically similar amino acid and retains the desired activity of the polypeptide. Such conservatively modified variants are in addition to and do not exclude polymorphic variants, interspecies homologs, and alleles consistent with the disclosure.

[0356] A given amino acid can be replaced by a residue having similar physiochemical characteristics, e.g., substituting one aliphatic residue for another (such as Ile, Val, Leu, or Ala for one another), or substitution of one polar residue for another (such as between Lys and Arg; Glu and Asp; or Gln and Asn). Other such conservative substitutions, e.g., substitutions of entire regions having similar hydrophobicity characteristics, are well known. Polypeptides comprising conservative amino acid substitutions can be tested in any one of the assays described herein to confirm that a desired activity and specificity of a native or reference polypeptide is retained.

[0357] Amino acids can be grouped according to similarities in the properties of their side chains (in A. L. Lehninger, in Biochemistry, second ed., pp. 73-75, Worth Publishers, New York (1975)): (1) non-polar: Ala (A), Val (V), Leu (L), Ile (I), Pro (P), Phe (F), Trp (W), Met (M); (2) uncharged polar: Gly (G), Ser (S), Thr (T), Cys (C), Tyr (Y), Asn (N), Gln (Q); (3) acidic: Asp (D), Glu (E); (4) basic: Lys (K), Arg (R), His (H). Alternatively, naturally occurring residues can be divided into groups based on common side-chain properties: (1) hydrophobic: Norleucine, Met, Ala, Val, Leu, Ile; (2) neutral hydrophilic: Cys, Ser, Thr, Asn, Gln; (3) acidic: Asp, Glu; (4) basic: His, Lys, Arg; (5) residues that influence chain orientation: Gly, Pro; (6) aromatic: Trp, Tyr, Phe. Non-conservative substitutions will entail exchanging a member of one of these classes for another class. Particular conservative substitutions include, for example; Ala into Gly or into Ser; Arg into Lys; Asn into Gln or into His; Asp into Glu; Cys into Ser; Gln into Asn; Glu into Asp; Gly into Ala or into Pro; His into Asn or into Gln; Ile into Leu or into Val; Leu into Ile or into Val; Lys into Arg, into Gln or into Glu; Met into Leu, into Tyr or into Ile; Phe into Met, into Leu or into Tyr; Ser into Thr; Thr into Ser; Trp into Tyr; Tyr into Trp; and/or Phe into Val, into Ile or into Leu.

[0358] In some embodiments, the polypeptide described herein (or a nucleic acid encoding such a polypeptide) can be a functional fragment of one of the amino acid sequences described herein. As used herein, a “functional fragment” is a fragment or segment of a peptide which retains at least 50% of the wildtype reference polypeptide's activity according to a suitable assay for gene activity, e.g., pollen viability and/or seed set. A functional fragment can comprise conservative substitutions of the sequences disclosed herein.

[0359] In some embodiments, the polypeptide described herein can be a variant of a sequence described herein. In some embodiments, the variant is a conservatively modified variant. Conservative substitution variants can be obtained by mutations of native nucleotide sequences, for example. A “variant,” as referred to herein, is a polypeptide substantially homologous to a native or reference polypeptide, but which has an amino acid sequence different from that of the native or reference polypeptide because of one or a plurality of deletions, insertions or substitutions. Variant polypeptide-encoding DNA sequences encompass sequences that comprise one or more additions, deletions, or substitutions of nucleotides when compared to a native or reference DNA sequence, but that encode a variant protein or fragment thereof that retains activity. A wide variety of PCR-based site-specific mutagenesis approaches are known in the art and can be applied by the ordinarily skilled artisan.

[0360] A variant amino acid or DNA sequence can be at least 90%, at least 91%, at least 92%, at least 93%, at least 94%, at least 95%, at least 96%, at least 97%, at least 98%, at least 99%, or more, identical to a native or reference sequence. The degree of homology (percent identity) between a native and a mutant sequence can be determined, for example, by comparing the two sequences using freely available computer programs commonly employed for this purpose on the world wide web (e.g. BLASTp or BLASTn with default settings).

[0361] Alterations of the native amino acid sequence can be accomplished by any of a number of techniques known to one of skill in the art. Mutations can be introduced, for example, at particular loci by synthesizing oligonucleotides containing a mutant sequence, flanked by restriction sites enabling ligation to fragments of the native sequence. Following ligation, the resulting reconstructed sequence encodes an analog having the desired amino acid insertion, substitution, or deletion. Alternatively, oligonucleotide-directed site-specific mutagenesis procedures can be employed to provide an altered nucleotide sequence having particular codons altered according to the substitution, deletion, or insertion required. Techniques for making such alterations are very well established and include, for example, those disclosed by Walder et al. (Gene 42:133, 1986); Bauer et al. (Gene 37:73, 1985); Craik (BioTechniques, Jan. 1985, 12-19); Smith et al. (Genetic Engineering: Principles and Methods, Plenum Press, 1981); and U.S. Pat. Nos. 4,518,584 and 4,737,462, which are herein incorporated by reference in their entireties. Any cysteine residue not involved in maintaining the proper conformation of the polypeptide also can be substituted, generally with serine, to improve the oxidative stability of the molecule and prevent aberrant crosslinking. Conversely, cysteine bond(s) can be added to the polypeptide to improve its stability or facilitate oligomerization.

[0362] As used herein, the term “nucleic acid” or “nucleic acid sequence” refers to any molecule, preferably a polymeric molecule, incorporating units of ribonucleic acid, deoxyribonucleic acid or an analog thereof. The nucleic acid can be either single-stranded or double-stranded. A single-stranded nucleic acid can be one nucleic acid strand of a denatured double-stranded DNA. Alternatively, it can be a single-stranded nucleic acid not derived from any double-stranded DNA. In one aspect, the nucleic acid can be DNA. In another aspect, the nucleic acid can be RNA. Suitable DNA can include, e.g., genomic DNA or cDNA. Suitable RNA can include, e.g., mRNA.

[0363] In some embodiments of any of the aspects, a polypeptide, nucleic acid, or cell as described herein can be engineered. As used herein, “engineered” refers to the aspect of having been manipulated by the hand of man. For example, a polypeptide is considered to be “engineered” when at least one aspect of the polypeptide, e.g., its sequence, has been manipulated by the hand of man to differ from the aspect as it exists in nature. As is common practice and is understood by those in the art, progeny of an engineered cell are typically still referred to as “engineered” even though the actual manipulation was performed on a prior entity.

[0364] As used herein, a “transgenic” organism or cell is one in which exogenous DNA from another source (natural, from a second non-crossable species, or synthetic) has been introduced.

[0365] The term “exogenous” refers to a substance present in a cell other than its native source. The term “exogenous” when used herein can refer to a nucleic acid (e.g., a nucleic acid encoding a polypeptide) or a polypeptide that has been introduced by a process involving the hand of man into a biological system such as a cell or organism in which it is not normally found and one wishes to introduce the nucleic acid or polypeptide into such a cell or organism.

[0366] “Ectopic” refers to a nucleic acid or a polypeptide that has been introduced by a process involving the hand of man into a biological system such as a cell or organism in which it is found in relatively low amounts and one wishes to increase the amount of the nucleic acid or polypeptide in the cell or organism, e.g., to create ectopic expression or levels; or which has been introduced by a process involving the hand of man into a different location within the same biological system (such as a cell or organism) in which the nucleic acid or polypeptide naturally occurs.

[0367] In contrast, the term “endogenous” refers to a substance that is native to the biological system or cell in both location and amount.

[0368] As used herein, “cognate” with respect to the maintainer line and its phenotypic relative (e.g., a male-sterile line), refers to the two plants carrying recessive alleles (e.g., loss-of-function alleles) of the same phenotype-controlling gene(s) of interest according to the schemes described herein. For example, a male-sterile plant which comprises only recessive non-functional alleles of a first MF gene is not cognate with a maintainer line which carries recessive non-functional alleles of a second MF gene. It is noted that the recessive alleles need not be identical in sequence in order for a maintainer and the phenotypic relative to be cognate.

[0369] In some embodiments, a nucleic acid encoding a DNA or an RNA molecule or a polypeptide as described herein can be introduced into a cell by, e.g., biolistic delivery.

[0370] In some embodiments, a nucleic acid encoding an RNA or polypeptide as described herein is comprised by a vector. In some of the aspects described herein, a nucleic acid sequence encoding a given polypeptide as described herein, or any module thereof, is operably linked to a vector. The term “vector”, as used herein, refers to a nucleic acid construct designed for delivery to a host cell or for transfer between different host cells. As used herein, a vector can be viral or non-viral. The term “vector” encompasses any genetic element that is capable of replication when associated with the proper control elements and that can transfer gene sequences to cells. A vector can include, but is not limited to, a cloning vector, an expression vector, a plasmid, phage, transposon, cosmid, chromosome, virus, virion, etc. Exemplary vectors are known in the art and can include, by way of non-limiting example, pBR322 and related plasmids, pACYC and related plasmids, transcription vectors, expression vectors, phagemids, yeast expression vectors, plant expression vectors, pDONR201 (Invitrogen), pBIl21, pBIN20, pEarleyGate100 (ABRC), pEarleyGate102 (ABRC), pCAMBIA, pUC-derived vectors, pSK-derived vectors, pGEM-derived vectors, pSP-derived vectors, pBS-derived vectors, the binary Ti plasmid (see, e.g., U.S. Pat. No. 4,940,838; which is incorporated by reference herein in its entirety), T-DNA, transposons, and artificial chromosomes.

[0371] As used herein, the term “expression vector” refers to a vector that directs expression of an RNA or polypeptide from sequences operably linked to transcriptional regulatory sequences on the vector. The term “operably linked” as used herein refers to a functional linkage between a regulatory element and a second sequence, wherein the regulatory element influences the expression and/or processing of the second sequence. Generally, “operably linked” means that the nucleic acid sequences being linked are contiguous or near contiguous and, where necessary to join two protein coding regions, contiguous and in the same reading frame. The regulatory sequence, e.g., a promoter, can be a constitutive, tissue-specific, and/or inducible promoter. The sequences expressed will often, but not necessarily, be heterologous to the cell. An expression vector may comprise additional elements, for example, the expression vector may have two replication systems, thus allowing it to be maintained in two organisms, for example in plant cells for expression and in a prokaryotic host for cloning and amplification. The term “expression” refers to the cellular processes involved in producing RNA and proteins and as appropriate, secreting proteins, including where applicable, but not limited to, for example, transcription, transcript processing, translation and protein folding, modification and processing. “Expression products” include RNA transcribed from a gene, and polypeptides obtained by translation of mRNA transcribed from a gene. The term “gene” means the nucleic acid sequence which is transcribed (DNA) to RNA in vitro or in vivo when operably linked to appropriate regulatory sequences. The gene may or may not include regions preceding and following the coding region, e.g. 5′ untranslated (5′UTR) or “leader” sequences and 3′ UTR or “trailer” sequences, as well as intervening sequences (introns) between individual coding segments (exons).

[0372] As used herein, the term “viral vector” refers to a nucleic acid vector construct that includes at least one element of viral origin and has the capacity to be packaged into a viral vector particle. The viral vector can contain the nucleic acid encoding a polypeptide as described herein in place of non-essential viral genes. The vector and/or particle may be utilized for the purpose of transferring any nucleic acids into cells either in vitro or in vivo. Numerous forms of viral vectors are known in the art.

[0373] By “recombinant vector” is meant a vector that includes a heterologous nucleic acid sequence, or “transgene” that is capable of expression in vivo. It should be understood that the vectors described herein can, in some embodiments, be combined with other suitable compositions and therapies. In some embodiments, the vector is episomal. The use of a suitable episomal vector provides a means of maintaining the nucleotide of interest in the subject in high copy number extra chromosomal DNA thereby eliminating potential effects of chromosomal integration.

[0374] In the context of this invention, hybridization means hydrogen bonding, which may be Watson-Crick, Hoogsteen or reversed Hoogsteen hydrogen bonding, between complementary nucleoside or nucleotide bases. For example, adenine and thymine are complementary nucleobases which pair through the formation of hydrogen bonds. Complementary, as used herein, refers to the capacity for precise pairing between two nucleotides. For example, if a nucleotide at a certain position of an oligonucleotide is capable of hydrogen bonding with a nucleotide at the same position of a DNA or RNA molecule, then the oligonucleotide and the DNA or RNA are considered to be complementary to each other at that position. The oligonucleotide and the DNA or RNA are complementary to each other when a sufficient number of corresponding positions in each molecule are occupied by nucleotides which can hydrogen bond with each other. Thus, “specifically hybridizable” refers to a sufficient degree of complementarity or precise pairing such that stable and specific binding occurs between the two nucleic acid sequences under the relevantly strigent conditions, e.g., in this case, in a plant cell. As used herein, the term “specific binding” refers to a chemical interaction between two molecules, compounds, cells and/or particles wherein the first entity binds to the second, target entity with greater specificity and affinity than it binds to a third entity which is a non-target. In some embodiments, specific binding can refer to an affinity of the first entity for the second target entity which is at least 10 times, at least 50 times, at least 100 times, at least 500 times, at least 1000 times or greater than the affinity for the third nontarget entity. A reagent specific for a given target is one that exhibits specific binding for that target under the conditions of the assay being utilized.

[0375] As used herein, “contacting” refers to any suitable means for delivering, or exposing, an agent to at least one cell. The cell can be ex vivo or in vitro. In some embodiments, a cell is contacted. In some embodiments, at least one cell in a culture or tissue is contact. In some embodiments, at least one cell in a plant is contacted. Exemplary delivery methods include, but are not limited to, direct delivery to cell culture medium, perfusion, injection, transfection, ballistic delivery, or other delivery method well known to one skilled in the art. In some embodiments, contacting comprises physical human activity, e.g., an injection; an act of dispensing, mixing, and/or decanting; and/or manipulation of a delivery device or machine.

[0376] The term “statistically significant” or “significantly” refers to statistical significance and generally means a two standard deviation (2SD) or greater difference.

[0377] Other than in the operating examples, or where otherwise indicated, all numbers expressing quantities of ingredients or reaction conditions used herein should be understood as modified in all instances by the term “about.” The term “about” when used in connection with percentages can mean±1%.

[0378] As used herein, the term “comprising” means that other elements can also be present in addition to the defined elements presented. The use of “comprising” indicates inclusion rather than limitation.

[0379] The term “consisting of” refers to compositions, methods, and respective components thereof as described herein, which are exclusive of any element not recited in that description of the embodiment.

[0380] As used herein the term “consisting essentially of” refers to those elements required for a given embodiment. The term permits the presence of additional elements that do not materially affect the basic and novel or functional characteristic(s) of that embodiment of the invention.

[0381] The singular terms “a,” “an,” and “the” include plural referents unless context clearly indicates otherwise. Similarly, the word “or” is intended to include “and” unless the context clearly indicates otherwise. Although methods and materials similar or equivalent to those described herein can be used in the practice or testing of this disclosure, suitable methods and materials are described below. The abbreviation, “e.g.” is derived from the Latin exempli gratia, and is used herein to indicate a non-limiting example. Thus, the abbreviation “e.g.” is synonymous with the term “for example.”

[0382] Groupings of alternative elements or embodiments of the invention disclosed herein are not to be construed as limitations. Each group member can be referred to and claimed individually or in any combination with other members of the group or other elements found herein. One or more members of a group can be included in, or deleted from, a group for reasons of convenience and/or patentability. When any such inclusion or deletion occurs, the specification is herein deemed to contain the group as modified thus fulfilling the written description of all Markush groups used in the appended claims.

[0383] Unless otherwise defined herein, scientific and technical terms used in connection with the present application shall have the meanings that are commonly understood by those of ordinary skill in the art to which this disclosure belongs. It should be understood that this invention is not limited to the particular methodology, protocols, and reagents, etc., described herein and as such can vary. The terminology used herein is for the purpose of describing particular embodiments only, and is not intended to limit the scope of the present invention, which is defined solely by the claims. Definitions of common terms in molecular biology can be found in The Merck Manual of Diagnosis and Therapy, 19th Edition, published by Merck Sharp & Dohme Corp., 2011 (ISBN 978-0-911910-19-3); Robert S. Porter et al. (eds.), The Encyclopedia of Molecular Cell Biology and Molecular Medicine, published by Blackwell Science Ltd., 1999-2012 (ISBN 9783527600908); and Robert A. Meyers (ed.), Molecular Biology and Biotechnology: a Comprehensive Desk Reference, published by VCH Publishers, Inc., 1995 (ISBN 1-56081-569-8); Immunology by Werner Luttmann, published by Elsevier, 2006; Janeway's Immunobiology, Kenneth Murphy, Allan Mowat, Casey Weaver (eds.), Taylor & Francis Limited, 2014 (ISBN 0815345305, 9780815345305); Lewin's Genes XI, published by Jones & Bartlett Publishers, 2014 (ISBN-1449659055); Michael Richard Green and Joseph Sambrook, Molecular Cloning: A Laboratory Manual, 4^{th} ed., Cold Spring Harbor Laboratory Press, Cold Spring Harbor, N.Y., USA (2012) (ISBN 1936113414); Davis et al., Basic Methods in Molecular Biology, Elsevier Science Publishing, Inc., New York, USA (2012) (ISBN 044460149X); Laboratory Methods in Enzymology: DNA, Jon Lorsch (ed.) Elsevier, 2013 (ISBN 0124199542); Current Protocols in Molecular Biology (CPMB), Frederick M. Ausubel (ed.), John Wiley and Sons, 2014 (ISBN 047150338X, 9780471503385), Current Protocols in Protein Science (CPPS), John E. Coligan (ed.), John Wiley and Sons, Inc., 2005; and Current Protocols in Immunology (CPI) (John E. Coligan, ADA M Kruisbeek, David H Margulies, Ethan M Shevach, Warren Strobe, (eds.) John Wiley and Sons, Inc., 2003 (ISBN 0471142735, 9780471142737), the contents of which are all incorporated by reference herein in their entireties.

[0384] Other terms are defined herein within the description of the various aspects of the invention.

[0385] All patents and other publications; including literature references, issued patents, published patent applications, and co-pending patent applications; cited throughout this application are expressly incorporated herein by reference for the purpose of describing and disclosing, for example, the methodologies described in such publications that might be used in connection with the technology described herein. These publications are provided solely for their disclosure prior to the filing date of the present application. Nothing in this regard should be construed as an admission that the inventors are not entitled to antedate such disclosure by virtue of prior invention or for any other reason. All statements as to the date or representation as to the contents of these documents is based on the information available to the applicants and does not constitute any admission as to the correctness of the dates or contents of these documents.

[0386] The description of embodiments of the disclosure is not intended to be exhaustive or to limit the disclosure to the precise form disclosed. While specific embodiments of, and examples for, the disclosure are described herein for illustrative purposes, various equivalent modifications are possible within the scope of the disclosure, as those skilled in the relevant art will recognize. For example, while method steps or functions are presented in a given order, alternative embodiments may perform functions in a different order, or functions may be performed substantially concurrently. The teachings of the disclosure provided herein can be applied to other procedures or methods as appropriate. The various embodiments described herein can be combined to provide further embodiments. Aspects of the disclosure can be modified, if necessary, to employ the compositions, functions and concepts of the above references and application to provide yet further embodiments of the disclosure. Moreover, due to biological functional equivalency considerations, some changes can be made in protein structure without affecting the biological or chemical action in kind or amount. These and other changes can be made to the disclosure in light of the detailed description. All such modifications are intended to be included within the scope of the appended claims.

[0387] Specific elements of any of the foregoing embodiments can be combined or substituted for elements in other embodiments. Furthermore, while advantages associated with certain embodiments of the disclosure have been described in the context of these embodiments, other embodiments may also exhibit such advantages, and not all embodiments need necessarily exhibit such advantages to fall within the scope of the disclosure.

[0388] The invention can be further described with reference to the accompanying sequences, wherein:
[0389] SEQ ID NO 1 is the amino-acid sequence for which Mfw1-A codes
[0390] SEQ ID NO 2 is the amino-acid sequence for which Mfw1-B codes
[0391] SEQ ID NO 3 is the amino-acid sequence for which Mfw1-D codes
[0392] SEQ ID NO 4 is the amino-acid sequence for which Mfw2-A codes
[0393] SEQ ID NO 5 is the amino-acid sequence for which Mfw2-B codes
[0394] SEQ ID NO 6 is the amino-acid sequence for which Mfw2-D codes
[0395] SEQ ID NO 7 is the DNA coding sequence (from start codon to stop codon inclusive) of Mfw1-A from wheat (Triticum aestivum, variety ‘Fielder’)
[0396] SEQ ID NO 8 is the DNA coding sequence (from start codon to stop codon inclusive) of Mfw1-B from wheat (Triticum aestivum, variety ‘Fielder’)
[0397] SEQ ID NO 9 is the DNA coding sequence (from start codon to stop codon inclusive) of Mfw1-D from wheat (Triticum aestivum, variety ‘Fielder’)
[0398] SEQ ID NO 10 is the DNA coding sequence (from start codon to stop codon inclusive) of Mfw2-A from wheat (Triticum aestivum, variety ‘Fielder’)
[0399] SEQ ID NO 11 is the DNA coding sequence (from start codon to stop codon inclusive) of Mfw2-B from wheat (Triticum aestivum, variety ‘Fielder’)
[0400] SEQ ID NO 12 is the DNA coding sequence (from start codon to stop codon inclusive) of Mfw2-D from wheat (Triticum aestivum, variety ‘Fielder’)
[0401] SEQ ID NO 13 is a partial sequence of chromosome 7A of wheat (Triticum aestivum, variety ‘Chinese Spring’) including Mfw1-A
[0402] SEQ ID NO 14 is a partial sequence chromosome 7A of wheat (Triticum aestivum, variety ‘Chinese Spring’) including Mfw2-A
[0403] SEQ ID NO 15 is a partial sequence of chromosome 7B of wheat (Triticum aestivum, variety ‘Chinese Spring’) including Mfw1-B
[0404] SEQ ID NO 16 is a partial sequence of chromosome 7B of wheat (Triticum aestivum, variety ‘Chinese Spring’) including Mfw2-B
[0405] SEQ ID NO 17 is a partial sequence of chromosome 7D of wheat (Triticum aestivum, variety ‘Chinese Spring’) including Mfw1-D
[0406] SEQ ID NO 18 is a partial sequence of chromosome 7D of wheat (Triticum aestivum, variety ‘Chinese Spring’) including Mfw2-D
[0407] SEQ ID NO 19 is a DNA sequence that can be used in a hairpin described in International Patent Publication WO 2018/022410.
[0408] SEQ ID NO: 20 is a sequence of Mfw1 and SEQ ID NOs: 22-25 are guide targeting sequences for SEQ ID NO: 20.
[0409] SEQ ID NO: 21 is a sequence of Mfw2 and SEQ ID NOs: 26-29 are guide targeting sequences for SEQ ID NO: 21.
[0410] SEQ ID NO 30 is the amino-acid sequence for which Mfw3-A codes.
[0411] SEQ ID NO 31 is the amino-acid sequence for which Mfw3-B codes.
[0412] SEQ ID NO 32 is the amino-acid sequence for which Mfw3-D codes.
[0413] SEQ ID NO 33 is the amino-acid sequence for which Mfw5-A codes.
[0414] SEQ ID NO 34 is the amino-acid sequence for which Mfw5-B codes.
[0415] SEQ ID NO 35 is the amino-acid sequence for which Mfw5-D codes.
[0416] SEQ ID NO 36 is the DNA coding sequence (from start-codon to stop-codon inclusive) of Mfw3-A from wheat (Triticum aestivum, variety ‘Fielder’). SEQ ID NOs: 131-134 are guide targeting sequences for SEQ ID NO: 36. SEQ ID NO: 54 is a portion of SEQ ID NO: 36 that can be used in a Mfw-3/Mfw-5 hairpin described in International Patent Publication WO 2018/022410.
[0417] SEQ ID NO 37 is the DNA coding sequence (from start-codon to stop-codon inclusive) of Mfw3-B from wheat (Triticum aestivum, variety ‘Fielder’). SEQ ID NOs: 135-138 are guide targeting sequences for SEQ ID NO: 37. SEQ ID NO: 55 is a portion of SEQ ID NO: 37 that can be used in a Mfw-3/Mfw-5 hairpin described in International Patent Publication WO 2018/022410.
[0418] SEQ ID NO 38 is the DNA coding sequence (from start-codon to stop-codon inclusive) of Mfw3-D from wheat (Triticum aestivum, variety ‘Fielder’). SEQ ID NOs: 139-142 are guide targeting sequences for SEQ ID NO: 38. SEQ ID NO: 56 is a portion of SEQ ID NO: 38 that can be used in a Mfw-3/Mfw-5 hairpin described in International Patent Publication WO 2018/022410.
[0419] SEQ ID NO 39 is the DNA coding sequence (from start-codon to stop-codon inclusive) of Mfw5-A from wheat (Triticum aestivum, variety ‘Fielder’).
[0420] SEQ ID NO 40 is the DNA coding sequence (from start-codon to stop-codon inclusive) of Mfw5-B from wheat (Triticum aestivum, variety ‘Fielder’).
[0421] SEQ ID NO 41 is the DNA coding sequence (from start-codon to stop-codon inclusive) of Mfw5-D from wheat (Triticum aestivum, variety ‘Fielder’).
[0422] SEQ ID NO 42 is a partial sequence of chromosome 6A of wheat (Triticum aestivum, variety ‘Chinese Spring’) including Mfw3-A.
[0423] SEQ ID NO 43 is a partial sequence of chromosome 6B of wheat (Triticum aestivum, variety ‘Chinese Spring’) including Mfw3-B.
[0424] SEQ ID NO 44 is a partial sequence of chromosome 6D of wheat (Triticum aestivum, variety ‘Chinese Spring’) including Mfw3-D.
[0425] SEQ ID NO 45 is a partial sequence of chromosome 2A of wheat (Triticum aestivum, variety ‘Chinese Spring’) including Mfw5-A.
[0426] SEQ ID NO 46 is a partial sequence of chromosome 2B of wheat (Triticum aestivum, variety ‘Chinese Spring’) including Mfw5-B.
[0427] SEQ ID NO 47 is a partial sequence of chromosome 2D of wheat (Triticum aestivum, variety ‘Chinese Spring’) including Mfw5-D.
[0428] SEQ ID NO 48 is a DNA sequence that can be used in a Mfw-3/Mfw-5 hairpin described in International Patent Publication WO 2018/022410.
[0429] SEQ ID NO 60 is the amino-acid sequence for which Mfw4-A codes.
[0430] SEQ ID NO 61 is the DNA coding sequence (from start-codon to stop-codon inclusive) of Mfw4-A from wheat (Triticum aestivum, variety ‘Fielder’).
[0431] SEQ ID NO 62 is a partial sequence of the wheat (Triticum aestivum, variety ‘Chinese Spring’) genomic sequence including Mfw4-A.
[0432] SEQ ID NO 63 is the amino-acid sequence for which Mfw4-B codes.
[0433] SEQ ID NO 64 is the DNA coding sequence (from start-codon to stop-codon inclusive) of Mfw4-B from wheat (Triticum aestivum, variety ‘Fielder’).
[0434] SEQ ID NO 65 is a partial sequence of the wheat (Triticum aestivum, variety ‘Chinese Spring’) genomic sequence including Mfw4-B.
[0435] SEQ ID NO 66 is the amino-acid sequence for which Mfw4-D codes.
[0436] SEQ ID NO 67 is the DNA coding sequence (from start-codon to stop-codon inclusive) of Mfw4-D from wheat (Triticum aestivum, variety ‘Fielder’).
[0437] SEQ ID NO 68 is a partial sequence of the wheat (Triticum aestivum, variety ‘Chinese Spring’) genomic sequence including Mfw4-D.
[0438] SEQ ID NO 69 is the amino-acid sequence for which Mfw6-A codes.
[0439] SEQ ID NO 70 is the DNA coding sequence (from start-codon to stop-codon inclusive) of Mfw6-A from wheat (Triticum aestivum, variety ‘Fielder’).
[0440] SEQ ID NO 71 is a partial sequence of the wheat (Triticum aestivum, variety ‘Chinese Spring’) genomic sequence including Mfw6-A.
[0441] SEQ ID NO 72 is the amino-acid sequence for which Mfw6-D codes.
[0442] SEQ ID NO 73 is the DNA coding sequence (from start-codon to stop-codon inclusive) of Mfw6-D from wheat (Triticum aestivum, variety ‘Fielder’).
[0443] SEQ ID NO 74 is a partial sequence of the wheat (Triticum aestivum, variety ‘Chinese Spring’) genomic sequence including Mfw6-D.
[0444] SEQ ID NO 75 is the amino-acid sequence for which Mfw7-A codes.
[0445] SEQ ID NO 76 is the DNA coding sequence (from start-codon to stop-codon inclusive) of Mfw7-A from wheat (Triticum aestivum, variety ‘Fielder’).
[0446] SEQ ID NO 77 is a partial sequence of the wheat (Triticum aestivum, variety ‘Chinese Spring’) genomic sequence including Mfw7-A.
[0447] SEQ ID NO 78 is the amino-acid sequence for which Mfw7-B codes.
[0448] SEQ ID NO 79 is the DNA coding sequence (from start-codon to stop-codon inclusive) of Mfw7-B from wheat (Triticum aestivum, variety ‘Fielder’).
[0449] SEQ ID NO 80 is a partial sequence of the wheat (Triticum aestivum, variety ‘Chinese Spring’) genomic sequence including Mfw7-B.
[0450] SEQ ID NO 81 is the amino-acid sequence for which Mfw7-D codes.
[0451] SEQ ID NO 82 is the DNA coding sequence (from start-codon to stop-codon inclusive) of Mfw7-D from wheat (Triticum aestivum, variety ‘Fielder’).
[0452] SEQ ID NO 83 is a partial sequence of the wheat (Triticum aestivum, variety ‘Chinese Spring’) genomic sequence including Mfw7-D.
[0453] SEQ ID NO 84 is the amino-acid sequence for which Mfw8-A codes.
[0454] SEQ ID NO 85 is the DNA coding sequence (from start-codon to stop-codon inclusive) of Mfw8-A from wheat (Triticum aestivum, variety ‘Fielder’).
[0455] SEQ ID NO 86 is a partial sequence of the wheat (Triticum aestivum, variety ‘Chinese Spring’) genomic sequence including Mfw8-A.
[0456] SEQ ID NO 87 is the amino-acid sequence for which Mfw8-B codes.
[0457] SEQ ID NO 88 is the DNA coding sequence (from start-codon to stop-codon inclusive) of Mfw8-B from wheat (Triticum aestivum, variety ‘Fielder’).
[0458] SEQ ID NO 89 is a partial sequence of the wheat (Triticum aestivum, variety ‘Chinese Spring’) genomic sequence including Mfw8-B.
[0459] SEQ ID NO 90 is the amino-acid sequence for which Mfw8-D codes.
[0460] SEQ ID NO 91 is the DNA coding sequence (from start-codon to stop-codon inclusive) of Mfw8-D from wheat (Triticum aestivum, variety ‘Fielder’).
[0461] SEQ ID NO 92 is a partial sequence of the wheat (Triticum aestivum, variety ‘Chinese Spring’) genomic sequence including Mfw8-D.
[0462] SEQ ID NO 93 is the amino-acid sequence for which Mfw9-A codes.
[0463] SEQ ID NO 94 is the DNA coding sequence (from start-codon to stop-codon inclusive) of Mfw9-A from wheat (Triticum aestivum, variety ‘Fielder’).
[0464] SEQ ID NO 95 is a partial sequence of the wheat (Triticum aestivum, variety ‘Chinese Spring’) genomic sequence including Mfw9-A.
[0465] SEQ ID NO 96 is the amino-acid sequence for which Mfw9-B codes.
[0466] SEQ ID NO 97 is the DNA coding sequence (from start-codon to stop-codon inclusive) of Mfw9-B from wheat (Triticum aestivum, variety ‘Fielder’).
[0467] SEQ ID NO 98 is a partial sequence of the wheat (Triticum aestivum, variety ‘Chinese Spring’) genomic sequence including Mfw9-B.
[0468] SEQ ID NO 99 is the amino-acid sequence for which Mfw9-D codes.
[0469] SEQ ID NO 100 is the DNA coding sequence (from start-codon to stop-codon inclusive) of Mfw9-D from wheat (Triticum aestivum, variety ‘Fielder’).
[0470] SEQ ID NO 101 is a partial sequence of the wheat (Triticum aestivum, variety ‘Chinese Spring’) genomic sequence including Mfw9-D.
[0471] SEQ ID NO 102 is the amino-acid sequence for which Mfw10-A codes.
[0472] SEQ ID NO 103 is the DNA coding sequence (from start-codon to stop-codon inclusive) of Mfw10-A from wheat (Triticum aestivum, variety ‘Fielder’).
[0473] SEQ ID NO 104 is a partial sequence of the wheat (Triticum aestivum, variety ‘Chinese Spring’) genomic sequence including Mfw10-A.
[0474] SEQ ID NO 105 is the amino-acid sequence for which Mfw10-B codes.
[0475] SEQ ID NO 106 is the DNA coding sequence (from start-codon to stop-codon inclusive) of Mfw10-B from wheat (Triticum aestivum, variety ‘Fielder’).
[0476] SEQ ID NO 107 is a partial sequence of the wheat (Triticum aestivum, variety ‘Chinese Spring’) genomic sequence including Mfw11-U.
[0477] SEQ ID NO 108 is the amino-acid sequence for which Mfw11-U codes.
[0478] SEQ ID NO 109 is the DNA coding sequence (from start-codon to stop-codon inclusive) of Mfw11-U from wheat (Triticum aestivum, variety ‘Fielder’).
[0479] SEQ ID NO 110 is a partial sequence of the wheat (Triticum aestivum, variety ‘Chinese Spring’) genomic sequence including Mfw11-U.
[0480] SEQ ID NO 111 is the amino-acid sequence for which Mfw12-A codes.
[0481] SEQ ID NO 112 is the DNA coding sequence (from start-codon to stop-codon inclusive) of Mfw12-A from wheat (Triticum aestivum, variety ‘Fielder’).
[0482] SEQ ID NO 113 is a partial sequence of the wheat (Triticum aestivum, variety ‘Chinese Spring’) genomic sequence including Mfw12-A.
[0483] SEQ ID NO 114 is the amino-acid sequence for which Mfw12-B codes.
[0484] SEQ ID NO 115 is the DNA coding sequence (from start-codon to stop-codon inclusive) of Mfw12-B from wheat (Triticum aestivum, variety ‘Fielder’).
[0485] SEQ ID NO 116 is a partial sequence of the wheat (Triticum aestivum, variety ‘Chinese Spring’) genomic sequence including Mfw12-B.
[0486] SEQ ID NO 117 is the amino-acid sequence for which Mfw12-D codes.
[0487] SEQ ID NO 118 is the DNA coding sequence (from start-codon to stop-codon inclusive) of Mfw12-D from wheat (Triticum aestivum, variety ‘Fielder’).
[0488] SEQ ID NO 119 is a partial sequence of the wheat (Triticum aestivum, variety ‘Chinese Spring’) genomic sequence including Mfw12-D.
[0489] SEQ ID NO 120 is the amino-acid sequence for which Mfw13-A codes.
[0490] SEQ ID NO 121 is the DNA coding sequence (from start-codon to stop-codon inclusive) of Mfw13-A from wheat (Triticum aestivum, variety ‘Fielder’).
[0491] SEQ ID NO 122 is a partial sequence of the wheat (Triticum aestivum, variety ‘Chinese Spring’) genomic sequence including Mfw13-A.
[0492] SEQ ID NO 123 is the amino-acid sequence for which Mfw13-B codes.
[0493] SEQ ID NO 124 is the DNA coding sequence (from start-codon to stop-codon inclusive) of Mfw13-B from wheat (Triticum aestivum, variety ‘Fielder’).
[0494] SEQ ID NO 125 is a partial sequence of the wheat (Triticum aestivum, variety ‘Chinese Spring’) genomic sequence including Mfw13-D.
[0495] SEQ ID NO 126 is the amino-acid sequence for which Mfw13-B codes.
[0496] SEQ ID NO 127 is the DNA coding sequence (from start-codon to stop-codon inclusive) of Mfw13-D from wheat (Triticum aestivum, variety ‘Fielder’).
[0497] SEQ ID NO 128 is a partial sequence of the wheat (Triticum aestivum, variety ‘Chinese Spring’) genomic sequence including Mfw13-D.
[0498] SEQ ID NO: 129 is the coding sequence of Mfw5-A. SEQ ID NOs: 143-146 are guide targeting sequences for SEQ ID NO: 129. SEQ ID NO: 57 is a portion of SEQ ID NO: 129 that can be used in a Mfw-3/Mfw-5 hairpin described in International Patent Publication WO 2018/022410.
[0499] SEQ ID NO: 130 is the coding sequence of Mfw5-B. SEQ ID NOs: 147-150 are guide targeting sequences for SEQ ID NO: 130. SEQ ID NO: 58 is a portion of SEQ ID NO: 130 that can be used in a Mfw-3/Mfw-5 hairpin described in International Patent Publication WO 2018/022410.
[0500] SEQ ID NO: 41 is the coding sequence of Mfw5-D. SEQ ID NOs: 151-154 are guide targeting sequences for SEQ ID NO: 41. SEQ ID NO: 57 is a portion of SEQ ID NO: 59 that can be used in a Mfw-3/Mfw-5 hairpin described in International Patent Publication WO 2018/022410.

[0501] Further description of certain sequences:
[0502] SEQ ID NO 13 is a partial sequence of that part of chromosome 7A of wheat (Triticum aestivum, variety ‘Chinese Spring’) that, from the start codon starting at 6072 bp to the end of the TAA stop codon at 8122 bp, includes the DNA coding sequence for Mfw1-A as well as flanking sequences upstream of the start codon and downstream of the stop codon. These flanking sequences may be expected to include regulatory sequences, such as, in the upstream flanking sequence, the promoter.
[0503] SEQ ID NO 14 is a partial sequence of that part of chromosome 7B of wheat (Triticum aestivum, variety ‘Chinese Spring’) that, from the start codon starting at 2076 bp to the end of the TAA stop codon at 3844 bp, includes the DNA coding sequence for Mfw2-A as well as flanking sequences upstream of the start codon and downstream of the stop codon. These flanking sequences may be expected to include regulatory sequences, such as, in the upstream flanking sequence, the promoter.
[0504] SEQ ID NO 15 is a partial sequence of that part of chromosome 7D of wheat (Triticum aestivum, variety ‘Chinese Spring’) that, from the start codon starting at 7957 bp to the end of the TAA stop codon at 9960 bp, includes the DNA coding sequence for Mfw1-B as well as flanking sequences upstream of the start codon and downstream of the stop codon. These flanking sequences may be expected to include regulatory sequences, such as, in the upstream flanking sequence, the promoter.
[0505] SEQ ID NO 16 is a partial sequence of that part of chromosome 7A of wheat (Triticum aestivum, variety ‘Chinese Spring’) that, from the start codon starting at 2949 bp to the end of the TGA stop codon at 16953 bp, includes the DNA coding sequence for Mfw2-B as well as flanking sequences upstream of the start codon and downstream of the stop codon. These flanking sequences may be expected to include regulatory sequences, such as, in the upstream flanking sequence, the promoter.
[0506] SEQ ID NO 17 is a partial sequence of that part of chromosome 7B of wheat (Triticum aestivum, variety ‘Chinese Spring’) that, from the start codon starting at 249 bp to the end of the TGA stop codon at 17681 bp, includes the DNA coding sequence for Mfw1-D as well as flanking sequences upstream of the start codon and downstream of the stop codon. These flanking sequences may be expected to include regulatory sequences, such as, in the upstream flanking sequence, the promoter.
[0507] SEQ ID NO 18 is a partial sequence of that part of chromosome 7D of wheat (Triticum aestivum, variety ‘Chinese Spring’) that, from the start codon starting at 1255 bp to the end of the TGA stop codon at 18448 bp, includes the DNA coding sequence for Mfw2-D as well as flanking sequences upstream of the start codon and downstream of the stop codon. These flanking sequences may be expected to include regulatory sequences, such as, in the upstream flanking sequence, the promoter.
[0508] SEQ ID NO 42 is a partial sequence of that part of chromosome 6A of wheat (Triticum aestivum, variety ‘Chinese Spring’) that, from the start codon starting at 2130 bp to the end of the TGA stop codon at 4398 bp, includes the DNA coding sequence for Mfw3-A as well as flanking sequences upstream of the start codon and downstream of the stop codon. These flanking sequences may be expected to include regulatory sequences, such as, in the upstream flanking sequence, the promoter.
[0509] SEQ ID NO 43 is a partial sequence of that part of chromosome 6B of wheat (Triticum aestivum, variety ‘Chinese Spring’) that, from the start codon starting at 1884 bp to the end of the TGA stop codon at 4144 bp, includes the DNA coding sequence for Mfw3-B as well as flanking sequences upstream of the start codon and downstream of the stop codon. These flanking sequences may be expected to include regulatory sequences, such as, in the upstream flanking sequence, the promoter.
[0510] SEQ ID NO 44 is a partial sequence of that part of chromosome 6D of wheat (Triticum aestivum, variety ‘Chinese Spring’) that, from the start codon starting at 2078 bp to the end of the TGA stop codon at 4269 bp, includes the DNA coding sequence for Mfw3-D as well as flanking sequences upstream of the start codon and downstream of the stop codon. These flanking sequences may be expected to include regulatory sequences, such as, in the upstream flanking sequence, the promoter.
[0511] SEQ ID NO 45 is a partial sequence of that part of chromosome 2A of wheat (Triticum aestivum, variety ‘Chinese Spring’) that, from the start codon starting at 1395 bp to the end of the TGA stop codon at 3650 bp, includes the DNA coding sequence for Mfw5-A as well as flanking sequences upstream of the start codon and downstream of the stop codon. These flanking sequences may be expected to include regulatory sequences, such as, in the upstream flanking sequence, the promoter.
[0512] SEQ ID NO 46 is a partial sequence of that part of chromosome 2B of wheat (Triticum aestivum, variety ‘Chinese Spring’) that, from the start codon starting at 2360 bp to the end of the TGA stop codon at 4734 bp, includes the DNA coding sequence for Mfw5-B as well as flanking sequences upstream of the start codon and downstream of the stop codon. These flanking sequences may be expected to include regulatory sequences, such as, in the upstream flanking sequence, the promoter.
[0513] SEQ ID NO 47 is a partial sequence of that part of chromosome 2D of wheat (Triticum aestivum, variety ‘Chinese Spring’) that, from the start codon starting at 1501 bp to the end of the TGA stop codon at 3579 bp, includes the DNA coding sequence for Mfw5-D as well as flanking sequences upstream of the start codon and downstream of the stop codon. These flanking sequences may be expected to include regulatory sequences, such as, in the upstream flanking sequence, the promoter.
[0514] SEQ ID NO 62 is a partial sequence of that part of the genomic sequence of wheat (Triticum aestivum, variety ‘Chinese Spring’) that, from the start codon starting at 1374 bp to the end of the TGA stop codon at 4938 bp, includes the DNA coding sequence for Mfw4-A as well as flanking sequences upstream of the start codon and downstream of the stop codon. These flanking sequences may be expected to include regulatory sequences, such as, in the upstream flanking sequence, the promoter.
[0515] SEQ ID NO 65 is a partial sequence of that part of the genomic sequence of wheat (Triticum aestivum, variety ‘Chinese Spring’) that, from the start codon starting at 1309 bp to the end of the TGA stop codon at 4637 bp, includes the DNA coding sequence for Mfw4-B as well as flanking sequences upstream of the start codon and downstream of the stop codon. These flanking sequences may be expected to include regulatory sequences, such as, in the upstream flanking sequence, the promoter.
[0516] SEQ ID NO 68 is a partial sequence of that part of the genomic sequence of wheat (Triticum aestivum, variety ‘Chinese Spring’) that, from the start codon starting at 1309 bp to the end of the TGA stop codon at 4637 bp, includes the DNA coding sequence for Mfw4-D as well as flanking sequences upstream of the start codon and downstream of the stop codon. These flanking sequences may be expected to include regulatory sequences, such as, in the upstream flanking sequence, the promoter.
[0517] SEQ ID NO 71 is a partial sequence of that part of the genomic sequence of wheat (Triticum aestivum, variety ‘Chinese Spring’) that, from the start codon starting at 1605 bp to the end of the TGA stop codon at 3022 bp, includes the DNA coding sequence for Mfw6-A as well as flanking sequences upstream of the start codon and downstream of the stop codon. These flanking sequences may be expected to include regulatory sequences, such as, in the upstream flanking sequence, the promoter.
[0518] SEQ ID NO 74 is a partial sequence of that part of the genomic sequence of wheat (Triticum aestivum, variety ‘Chinese Spring’) that, from the start codon starting at 1560 bp to the end of the TGA stop codon at 2980 bp, includes the DNA coding sequence for Mfw6-D as well as flanking sequences upstream of the start codon and downstream of the stop codon. These flanking sequences may be expected to include regulatory sequences, such as, in the upstream flanking sequence, the promoter.
[0519] SEQ ID NO 77 is a partial sequence of that part of the genomic sequence of wheat (Triticum aestivum, variety ‘Chinese Spring’) that, from the start codon starting at 1318 bp to the end of the TGA stop codon at 3470 bp, includes the DNA coding sequence for Mfw7-A as well as flanking sequences upstream of the start codon and downstream of the stop codon. These flanking sequences may be expected to include regulatory sequences, such as, in the upstream flanking sequence, the promoter.
[0520] SEQ ID NO 80 is a partial sequence of that part of the genomic sequence of wheat (Triticum aestivum, variety ‘Chinese Spring’) that, from the start codon starting at 1229 bp to the end of the TGA stop codon at 3369 bp, includes the DNA coding sequence for Mfw7-B as well as flanking sequences upstream of the start codon and downstream of the stop codon. These flanking sequences may be expected to include regulatory sequences, such as, in the upstream flanking sequence, the promoter.
[0521] SEQ ID NO 83 is a partial sequence of that part of the genomic sequence of wheat (Triticum aestivum, variety ‘Chinese Spring’) that, from the start codon starting at 1413 bp to the end of the TGA stop codon at 3588 bp, includes the DNA coding sequence for Mfw7-D as well as flanking sequences upstream of the start codon and downstream of the stop codon. These flanking sequences may be expected to include regulatory sequences, such as, in the upstream flanking sequence, the promoter.
[0522] SEQ ID NO 86 is a partial sequence of that part of the genomic sequence of wheat (Triticum aestivum, variety ‘Chinese Spring’) that, from the start codon starting at 1340 bp to the end of the TGA stop codon at 3407 bp, includes the DNA coding sequence for Mfw8-A as well as flanking sequences upstream of the start codon and downstream of the stop codon. These flanking sequences may be expected to include regulatory sequences, such as, in the upstream flanking sequence, the promoter.
[0523] SEQ ID NO 87 is a partial sequence of that part of the genomic sequence of wheat (Triticum aestivum, variety ‘Chinese Spring’) that, from the start codon starting at 1349 bp to the end of the TGA stop codon at 3422 bp, includes the DNA coding sequence for Mfw8-B as well as flanking sequences upstream of the start codon and downstream of the stop codon. These flanking sequences may be expected to include regulatory sequences, such as, in the upstream flanking sequence, the promoter.
[0524] SEQ ID NO 92 is a partial sequence of that part of the genomic sequence of wheat (Triticum aestivum, variety ‘Chinese Spring’) that, from the start codon starting at 1331 bp to the end of the TGA stop codon at 3401 bp, includes the DNA coding sequence for Mfw8-D as well as flanking sequences upstream of the start codon and downstream of the stop codon. These flanking sequences may be expected to include regulatory sequences, such as, in the upstream flanking sequence, the promoter.
[0525] SEQ ID NO 95 is a partial sequence of that part of the genomic sequence of wheat (Triticum aestivum, variety ‘Chinese Spring’) that, from the start codon starting at 1248 bp to the end of the TGA stop codon at 2849 bp, includes the DNA coding sequence for Mfw9-A as well as flanking sequences upstream of the start codon and downstream of the stop codon. These flanking sequences may be expected to include regulatory sequences, such as, in the upstream flanking sequence, the promoter.
[0526] SEQ ID NO 98 is a partial sequence of that part of the genomic sequence of wheat (Triticum aestivum, variety ‘Chinese Spring’) that, from the start codon starting at 393 bp to the end of the TGA stop codon at 32502 bp, includes the DNA coding sequence for Mfw9-B as well as flanking sequences upstream of the start codon and downstream of the stop codon. These flanking sequences may be expected to include regulatory sequences, such as, in the upstream flanking sequence, the promoter.
[0527] SEQ ID NO 101 is a partial sequence of that part of the genomic sequence of wheat (Triticum aestivum, variety ‘Chinese Spring’) that, from the start codon starting at 1273 bp to the end of the TGA stop codon at 2831 bp, includes the DNA coding sequence for Mfw9-D as well as flanking sequences upstream of the start codon and downstream of the stop codon. These flanking sequences may be expected to include regulatory sequences, such as, in the upstream flanking sequence, the promoter.
[0528] SEQ ID NO 104 is a partial sequence of that part of the genomic sequence of wheat (Triticum aestivum, variety ‘Chinese Spring’) that, from the start codon starting at 1398 bp to the end of the TGA stop codon at 3217 bp, includes the DNA coding sequence for Mfw10-A as well as flanking sequences upstream of the start codon and downstream of the stop codon. These flanking sequences may be expected to include regulatory sequences, such as, in the upstream flanking sequence, the promoter.
[0529] SEQ ID NO 107 is a partial sequence of that part of the genomic sequence of wheat (Triticum aestivum, variety ‘Chinese Spring’) that, from the start codon starting at 1407 bp to the end of the TGA stop codon at 3217 bp, includes the DNA coding sequence for Mfw10-B as well as flanking sequences upstream of the start codon and downstream of the stop codon. These flanking sequences may be expected to include regulatory sequences, such as, in the upstream flanking sequence, the promoter.
[0530] SEQ ID NO 110 is a partial sequence of that part of the genomic sequence of wheat (Triticum aestivum, variety ‘Chinese Spring’) that, from the start codon starting at 1553 bp to the end of the TGA stop codon at 2940 bp, includes the DNA coding sequence for Mfw11-U as well as flanking sequences upstream of the start codon and downstream of the stop codon. These flanking sequences may be expected to include regulatory sequences, such as, in the upstream flanking sequence, the promoter.
[0531] SEQ ID NO 113 is a partial sequence of that part of the genomic sequence of wheat (Triticum aestivum, variety ‘Chinese Spring’) that, from the start codon starting at 1309 bp to the end of the TGA stop codon at 3246 bp, includes the DNA coding sequence for Mfw12-A as well as flanking sequences upstream of the start codon and downstream of the stop codon. These flanking sequences may be expected to include regulatory sequences, such as, in the upstream flanking sequence, the promoter.
[0532] SEQ ID NO 116 is a partial sequence of that part of the genomic sequence of wheat (Triticum aestivum, variety ‘Chinese Spring’) that, from the start codon starting at 1281 bp to the end of the TGA stop codon at 3169 bp, includes the DNA coding sequence for Mfw12-B as well as flanking sequences upstream of the start codon and downstream of the stop codon. These flanking sequences may be expected to include regulatory sequences, such as, in the upstream flanking sequence, the promoter.
[0533] SEQ ID NO 119 is a partial sequence of that part of the genomic sequence of wheat (Triticum aestivum, variety ‘Chinese Spring’) that, from the start codon starting at 1300 bp to the end of the TGA stop codon at 3086 bp, includes the DNA coding sequence for Mfw12-D as well as flanking sequences upstream of the start codon and downstream of the stop codon. These flanking sequences may be expected to include regulatory sequences, such as, in the upstream flanking sequence, the promoter.
[0534] SEQ ID NO 122 is a partial sequence of that part of the genomic sequence of wheat (Triticum aestivum, variety ‘Chinese Spring’) that, from the start codon starting at 1308 bp to the end of the TGA stop codon at 3251 bp, includes the DNA coding sequence for Mfw13-A as well as flanking sequences upstream of the start codon and downstream of the stop codon. These flanking sequences may be expected to include regulatory sequences, such as, in the upstream flanking sequence, the promoter.
[0535] SEQ ID NO 125 is a partial sequence of that part of the genomic sequence of wheat (Triticum aestivum, variety ‘Chinese Spring’) that, from the start codon starting at 1259 bp to the end of the TGA stop codon at 3233 bp, includes the DNA coding sequence for Mfw13-B as well as flanking sequences upstream of the start codon and downstream of the stop codon. These flanking sequences may be expected to include regulatory sequences, such as, in the upstream flanking sequence, the promoter.
[0536] SEQ ID NO 128 is a partial sequence of that part of the genomic sequence of wheat (Triticum aestivum, variety ‘Chinese Spring’) that, from the start codon starting at 1446 bp to the end of the TGA stop codon at 3418 bp, includes the DNA coding sequence for Mfw13-D as well as flanking sequences upstream of the start codon and downstream of the stop codon. These flanking sequences may be expected to include regulatory sequences, such as, in the upstream flanking sequence, the promoter.
[0537] SEQ ID NO: 174 is the coding sequence of PV1-A
[0538] SEQ ID NO: 175 is the polypeptide sequence of PV1-A
[0539] SEQ ID NO: 176 is the genomic sequence of PV1-A. Start codon at bases 3,142-3,144. Stop codon at bases 9,522-9,524
[0540] SEQ ID NO: 177 is the coding sequence of PV1-B
[0541] SEQ ID NO: 178 is the polypeptide sequence of PV1-B
[0542] SEQ ID NO: 179 is the genomic sequence of PV1-B. Start codon at bases 3,000-3,002. Stop codon at bases 6,086-6,088.
[0543] SEQ ID NO: 180 is the coding sequence of PV1-D
[0544] SEQ ID NO: 181 is the polypeptide sequence of PV1-D
[0545] SEQ ID NO: 182 is the genomic sequence of PV1-D. Start codon at bases 3,201-3,203. Stop codon at bases 7,078-7,080.
[0546] SEQ ID NO: 183 is the predicted coding sequence of Ms1-A
[0547] SEQ ID NO: 184 is the predicted polypeptide sequence of Ms1-A.
[0548] SEQ ID NO: 185 is the genomic sequence of Ms1-A.
[0549] SEQ ID NO: 186 is the coding sequence of Ms1-B
[0550] SEQ ID NO: 187 is the polypeptide sequence of Ms1-B.
[0551] SEQ ID NO: 188 is the genomic sequence of Ms1-B.
[0552] SEQ ID NO: 189 is the predicted coding sequence of Ms1-D
[0553] SEQ ID NO: 190 is the predicted polypeptide sequence of Ms1-D.
[0554] SEQ ID NO: 191 is the genomic sequence of Ms1-D.
[0555] SEQ ID NO: 192 is the coding sequence of Ms26-A
[0556] SEQ ID NO: 193 is the polypeptide sequence of Ms26-A.
[0557] SEQ ID NO: 194 is the genomic sequence of Ms26-A.
[0558] SEQ ID NO: 195 is the coding sequence of Ms26-B
[0559] SEQ ID NO: 196 is the polypeptide sequence of Ms26-B.
[0560] SEQ ID NO: 197 is the genomic sequence of Ms26-B.
[0561] SEQ ID NO: 198 is the coding sequence of Ms26-D.
[0562] SEQ ID NO: 199 is the polypeptide sequence of Ms26-D.
[0563] SEQ ID NO: 200 is the genomic sequence of Ms26-D.
[0564] SEQ ID NO: 201 is the coding sequence of Ms45-A.
[0565] SEQ ID NO: 202 is the polypeptide sequence of Ms45-A.
[0566] SEQ ID NO: 203 is the genomic sequence of Ms45-A.
[0567] SEQ ID NO: 204 is the coding sequence of Ms45-B.
[0568] SEQ ID NO: 205 is the polypeptide sequence of Ms45-B.
[0569] SEQ ID NO: 206 is the genomic sequence of Ms45-B.
[0570] SEQ ID NO: 207 is the coding sequence of Ms45-D.
[0571] SEQ ID NO: 208 is the polypeptide sequence of Ms45-D.
[0572] SEQ ID NO: 209 is the genomic sequence of Ms45-D.
[0573] SEQ ID NO: 214 is the Chinese Spring genomic sequence of Ms1-B.
[0574] SEQ ID NO: 215 is the Chinese Spring coding sequence of Ms1-B.
[0575] SEQ ID NO: 216 is the Chinese Spring amino acid sequence of Ms1-B.
[0576] SEQ ID NO: 217 is a guide sequence for targeting Mfw2.
[0577] SEQ ID NO: 218 is a Mfw2′.1 genomic sequence. The altered guide RNA target sequence (SEQ ID NO: 217) is found at nucleotides 2,014-2,036 of SEQ ID NO: 218.

[0578] In some embodiments, the present technology may be defined in any of the following numbered paragraphs:
[0579] 1. A male-fertile maintainer plant for a male-sterile polyploid plant comprising:
   [0580] a first genome comprising:
      [0581] on a first chromosome of a pair of homologous chromosomes, at a single target locus, at least one functional ectopic allele of a MF gene and at least one functional allele of a seed endosperm color gene;
      [0582] on a second chromosome of the pair of homologous chromosomes, at the target locus corresponding to the target locus of the first chromosome of the pair of homologous chromosomes, at least one functional ectopic allele of a PV gene;
      [0583] loss-of-function alleles of the endogenous MF genes at the native MF gene loci and loss-of-function alleles of the endogenous PV genes at the native PV gene loci.
[0584] 2. The male-fertile maintainer plant of paragraph 1, comprising at least one further genome, each of the further genomes comprising loss-of-function alleles of the endogenous MF genes at the native MF gene loci and loss-of-function alleles of the PV gene at the native PV gene loci.
[0585] 3. The male-fertile maintainer plant of paragraph 1 or 2, wherein the target locus is the native MF gene locus.
[0586] 4. The male-fertile maintainer plant of paragraph 1 or 2, wherein the target locus is the native PV gene locus.
[0587] 5. The male-fertile maintainer plant of paragraph 1 or 2, wherein the target locus is not the native MF gene locus or the native PV gene locus.
[0588] 6. The male-fertile maintainer plant of any one of the preceding paragraphs, wherein the ectopic allele of the MF gene and/or the ectopic allele of the PV gene is a nuclease-null allele.
[0589] 7. The male-fertile maintainer plant of any one of the preceding paragraphs, wherein the ectopic allele of the MF gene and/or the ectopic allele of the PV gene is a CRISPR-null allele.
[0590] 8. A male-fertile maintainer plant for a male-sterile polyploid plant comprising:
   [0591] a first genome comprising:
      [0592] on a first chromosome of a pair of homologous chromosomes, at least one functional allele of a MF gene at the MF gene locus and at least one allele of a seed endosperm color gene;
      [0593] on a second chromosome of the pair of homologous chromosomes, a loss-of-function allele of the MF gene at the MF gene locus and at least one ectopic functional allele of a PV gene;
      [0594] and loss-of-function alleles of the PV gene at the native PV gene loci; and
   [0595] at least one further genome, each of the further genomes comprising loss-of-function alleles of the MF gene at the native MF gene loci and loss-of-function alleles of the PV gene at the native PV gene loci.
[0596] 9. The plant of any one of the preceding paragraphs, wherein the at least one functional allele of a MF gene is the endogenous wild-type functional allele of the MF gene.
[0597] 10. The plant of any one of the preceding paragraphs, wherein the at least one functional allele of a MF gene is an ectopic copy of the MF gene.
[0598] 11. The plant of paragraph 10, wherein the at least one functional allele of a MF gene and the at least one allele of a seed endosperm color gene are part of single construct.
[0599] 12. The plant of any one of the preceding paragraphs, wherein an ectopic allele or ectopic copy of a gene is a nuclease-null or CRISPR-null allele.
[0600] 13. The plant of any one of the preceding paragraphs, wherein the MF gene displays the same type of activity and shares at least 80%, at least 85%, at least 90%, at least 95%, or greater sequence identity with one or more of the genes of Table 1.
[0601] 14. The plant of paragraph 13, wherein the MF gene is selected from Table 1.
[0602] 15. The plant of any one of the preceding paragraphs, wherein the MF gene displays the same type of activity and shares at least 80%, at least 85%, at least 90%, at least 95%, or greater sequence identity with Mfw2.
[0603] 16. The plant of any one of the preceding paragraphs, wherein the MF gene is Mfw2.
[0604] 17. The plant of any one of the preceding paragraphs, wherein the PV gene displays the same type of activity and shares at least 80%, at least 85%, at least 90%, at least 95%, or greater sequence identity with PV1 or PV2.
[0605] 18. The plant of any one of the preceding paragraphs, wherein the PV gene is PV1 or PV2.
[0606] 19. The plant of any one of the preceding paragraphs, wherein the at least one allele of a seed endosperm color gene is exogenous.
[0607] 20. The plant of any one of the preceding paragraphs, wherein the at least one allele of a seed endosperm color gene is blue aleurone (BA).
[0608] 21. The plant of any one of the preceding paragraphs, wherein the at least one allele of a seed endosperm color gene comprises sequences obtained from a species within the same genus as the plant.
[0609] 22. The plant of any one of the preceding paragraphs, wherein the at least one allele of a seed endosperm color gene is located within 10 cM of the MF gene loci.
[0610] 23. The plant of any one of the preceding paragraphs, wherein the at least one allele of a seed endosperm color gene is located within 1 cM of the MF gene loci.
[0611] 24. The plant of any one of the preceding paragraphs, wherein the at least one ectopic functional allele of a PV gene is located within 10 cM of the MF gene loci.
[0612] 25. The plant of any one of the preceding paragraphs, wherein the at least one ectopic functional allele of a PV gene is located within 1 cM of the MF gene loci.
[0613] 26. The plant of any one of the preceding paragraphs, wherein the only exogenous sequence in the genomes is the at least one allele of a seed endosperm color gene.
[0614] 27. The plant of any one of the preceding paragraphs, wherein the only ectopic sequence in the genomes is the at least one ectopic functional allele of a PV gene.
[0615] 28. The plant of any one of the preceding paragraphs, wherein the plant is tetraploid and the second genome comprises loss-of-function alleles of the MF gene at the native MF gene loci and loss-of-function alleles of the PV gene at the native PV gene loci.
[0616] 29. The plant of any one of the preceding paragraphs, wherein the plant is hexaploid and the second and third genomes both comprise loss-of-function alleles of the MF gene at the native MF gene loci and loss-of-function alleles of the PV gene at the native PV gene loci.
[0617] 30. The plant of any one of the preceding paragraphs, wherein a loss-of-function allele comprises an engineered knock-out modification.
[0618] 31. The plant of any one of the preceding paragraphs, wherein a loss-of-function allele comprises an engineered excision of at least part of a coding or regulatory sequence.
[0619] 32. The plant of any one of paragraphs 30-31, wherein the loss-of-function allele is engineered using a site-specific guided nuclease.
[0620] 33. The plant of paragraph 32, wherein the site-specific guided nuclease is a form of CRISPR-Cas (such as CRISPR-Cas9).
[0621] 34. The plant of any one of the preceding paragraphs, wherein the plant is wheat, triticale, canola/oilseed rape, indian mustard, barley, rice, oat, or rye.
[0622] 35. The plant of any one of the preceding paragraphs, wherein the plant is wheat.
[0623] 36. The plant of paragraph 35, wherein the at least one allele of a seed endosperm color gene comprises a sequence from T. aestivum, T durum, T. monococcum or another Triticum aestivum-crossable species.
[0624] 37. The plant of any one of the preceding paragraphs, wherein the plant is hexaploid wheat or tetraploid wheat, Triticum aestivum, or Triticum durum.
[0625] 38. A method of preparing a male-fertile maintainer plant for a male-sterile polyploid plant, the method comprising engineering a plant to comprise:
   [0626] in a first genome:
      [0627] on a first chromosome of a pair of homologous chromosomes, at a single target locus, at least one functional ectopic allele of a MF gene and at least one functional allele of a seed endosperm color gene;
      [0628] on a second chromosome of the pair of homologous chromosomes, at the target locus corresponding to the target locus of the first chromosome of the pair of homologous chromosomes, at least one functional ectopic allele of a PV gene; and
      [0629] loss-of-function alleles of the endogenous MF genes at the native MF gene loci and loss-of-function alleles of the endogenous PV genes at the native PV gene loci.
[0630] 39. A method of preparing a male-fertile maintainer plant for a male-sterile polyploid plant, the method comprising, simultaneously or sequentially:
   [0631] inserting, on a first chromosome of a pair of homologous chromosomes in a first genome, at a single target locus, a construct comprising at least one functional ectopic allele of a MF gene and at least one functional allele of a seed endosperm color gene, optionally wherein the inserting comprises nuclease cleavage of the target locus (e.g., zinc-finger nuclease or CRISPR nuclease cleavage) and recombination or end-joining of the construct;
   [0632] inserting, on a second chromosome of the pair of homologous chromosomes in the first genome, at the target locus corresponding to the target locus of the first chromosome of the pair of homologous chromosomes, a construct comprising at least one functional ectopic allele of a PV gene, optionally wherein the inserting comprises nuclease cleavage of the target locus (e.g., zinc-finger nuclease or CRISPR nuclease cleavage) and/or recombination or end-joining of the construct; and
   [0633] mutating the the endogenous MF genes at the native MF gene loci and the endogenous PV genes at the native PV gene loci to create loss-of-function alleles, optionally wherein the loss-of-function alleles are caused by contacting the genome with a site-specific guided nuclease (e.g., CRISPR) and one or more guide RNA sequences or multi-guide constructs.
[0634] 40. The method of paragraph 38 or 39, wherein the plant further comprises at least one further genome, and the method further comprises engineering loss-of-function alleles of the endogenous MF genes at the native MF gene loci and loss-of-function alleles of the PV gene at the native PV gene loci in each of the at least one further genomes.
[0635] 41. The method of any one of paragraphs 38-40, wherein the target locus is the native MF gene locus.
[0636] 42. The method of any one of paragraphs 38-40, wherein the target locus is the native PV gene locus.
[0637] 43. The method of any one of paragraphs 38-40, wherein the target locus is not the native MF gene locus or the native PV gene locus.
[0638] 44. The method of any one of the preceding paragraphs, wherein the ectopic allele of the MF gene and/or the ectopic allele of the PV gene is a nuclease-null allele.
[0639] 45. The method of any of the preceding paragraphs, wherein the ectopic allele of the MF gene and/or the ectopic allele of the PV gene is a CRISPR-null allele.
[0640] 46. The method of any of the preceding paragraphs, wherein the at least one functional allele of a MF gene is the endogenous wild-type functional allele of the MF gene.
[0641] 47. The method of any of the preceding paragraphs, wherein the at least one functional allele of a MF gene is an ectopic copy of the MF gene.
[0642] 48. The method of paragraph 46, wherein the at least one functional allele of a MF gene and the at least one allele of a seed endosperm color gene are part of single construct.
[0643] 49. The method of any of the preceding paragraphs, wherein an ectopic allele or ectopic copy of a gene is a nuclease-null or CRISPR-null allele.
[0644] 50. The method of any of the preceding paragraphs, wherein the MF gene displays the same type of activity and shares at least 80%, at least 85%, at least 90%, at least 95%, or greater sequence identity with one or more of the genes of Table 1.
[0645] 51. The method of paragraph 50, wherein the MF gene is selected from Table 1.
[0646] 52. The method of any of the preceding paragraphs, wherein the MF gene displays the same type of activity and shares at least 80%, at least 85%, at least 90%, at least 95%, or greater sequence identity with Mfw2.
[0647] 53. The method of any of the preceding paragraphs, wherein the MF gene is Mfw2.
[0648] 54. The method of any of the preceding paragraphs, wherein the PV gene displays the same type of activity and shares at least 80%, at least 85%, at least 90%, at least 95%, or greater sequence identity with PV1 or PV2.
[0649] 55. The method of any of the preceding paragraphs, wherein the PV gene is PV1 or PV2.
[0650] 56. The method of any of the preceding paragraphs, wherein the at least one allele of a seed endosperm color gene is exogenous.
[0651] 57. The method of any of the preceding paragraphs, wherein the at least one allele of a seed endosperm color gene is blue aleurone (BA).
[0652] 58. The method of any of the preceding paragraphs, wherein the at least one allele of a seed endosperm color gene comprises sequences obtained from a species within the same genus as the plant.
[0653] 59. The method of any of the preceding paragraphs, wherein the at least one allele of a seed endosperm color gene is located within 10 cM of the MF gene loci.
[0654] 60. The method of any of the preceding paragraphs, wherein the at least one allele of a seed endosperm color gene is located within 1 cM of the MF gene loci.
[0655] 61. The method of any of the preceding paragraphs, wherein the at least one ectopic functional allele of a PV gene is located within 10 cM of the MF gene loci.
[0656] 62. The method of any of the preceding paragraphs, wherein the at least one ectopic functional allele of a PV gene is located within 1 cM of the MF gene loci.
[0657] 63. The method of any of the preceding paragraphs, wherein the only exogenous sequence in the genomes is the at least one allele of a seed endosperm color gene.
[0658] 64. The method of any of the preceding paragraphs, wherein the only ectopic sequence in the genomes is the at least one ectopic functional allele of a PV gene.
[0659] 65. The method of any of the preceding paragraphs, wherein the plant is tetraploid and the second genome comprises loss-of-function alleles of the MF gene at the native MF gene loci and loss-of-function alleles of the PV gene at the native PV gene loci.
[0660] 66. The method of any of the preceding paragraphs, wherein the plant is hexaploid and the second and third genomes both comprise loss-of-function alleles of the MF gene at the native MF gene loci and loss-of-function alleles of the PV gene at the native PV gene loci.
[0661] 67. The method of any of the preceding paragraphs, wherein a loss-of-function allele comprises an engineered knock-out modification.
[0662] 68. The method of any of the preceding paragraphs, wherein a loss-of-function allele comprises an engineered excision of at least part of a coding or regulatory sequence.
[0663] 69. The method of any of paragraphs 67-68, wherein the loss-of-function allele is engineered using a site-specific guided nuclease.
[0664] 70. The method of paragraph 69, wherein the site-specific guided nuclease is a form of CRISPR-Cas (such as CRISPR-Cas9).
[0665] 71. The method of any of the preceding paragraphs, wherein the plant is wheat, triticale, canola/oilseed rape, indian mustard, barley, rice, oat, or rye.
[0666] 72. The method of any of the preceding paragraphs, wherein the plant is wheat.
[0667] 73. The method of paragraph 72, wherein the at least one allele of a seed endosperm color gene comprises a sequence from T. aestivum, T durum, T. monococcum or another Triticum aestivum-crossable species.
[0668] 74. The method of any of the preceding paragraphs, wherein the plant is hexaploid wheat or tetraploid wheat, Triticum aestivum, or Triticum durum.
[0669] 75. The method of any of the preceding paragraphs, wherein the at least one functional ectopic allele of a MF gene and at least one functional allele of a seed endosperm color gene comprises the sequence of SEQ ID NO: 173 or a sequence with at least 80%, 85%, 90%, or 95% sequence identity thereto; and/or wherein the at least one functional ectopic allele of a PV gene comprises the sequence of SEQ ID NO: 172 or a sequence with at least 80%, 85%, 90%, or 95% sequence identity thereto.
[0670] 76. The method of any of the preceding paragraphs, wherein the guide RNA sequences and/or multi-guide constructs comprise one or more of SEQ ID NOs: 22-29 or 131-156.
[0671] 77. A method of providing a male sterile plant seed, the method comprising selecting, from seed produced by selfing a plant of any one of paragraphs 1-37, seed not displaying a phenotype provided by the seed endosperm gene.
[0672] 78. A method of providing male sterile plant seed, the method comprising selfing a plant of any one of paragraphs 1-37, whereby the resulting seed not displaying a phenotype provided by the seed endosperm gene is the male sterile plant seed.
[0673] 79. A method of providing a F1 hybrid seed for crop production, the method comprising collecting the seed produced by a male-sterile plant pollinated by a male-fertile plant, wherein the male-sterile plant is
   [0674] a) a plant grown from male sterile plant seed obtained by the method of paragraph 77 or 78; and/or
   [0675] b) comprises:
      [0676] i) loss-of-function alleles of an endogenous MF gene at each of the native MF gene loci;
      [0677] ii) loss-of-function alleles of an endogenous PV gene at each of the native PV gene loci; and
      [0678] iii) two ectopic alleles of the PV gene at a target locus.
[0679] 80. A method of providing a F1 hybrid seed for crop production, the method comprising crossing a a male-sterile plant with a male-fertile plant, wherein the male-sterile plant is
   [0680] a) a plant grown from male sterile plant seed obtained by the method of paragraph 77 or 78; and/or
   [0681] b) comprises:
      [0682] i) loss-of-function alleles of an endogenous MF gene at each of the native MF gene loci;
      [0683] ii) loss-of-function alleles of an endogenous PV gene at each of the native PV gene loci; and
      [0684] iii) two ectopic alleles of the PV gene at a target locus.
[0685] 81. A method of providing a F1 hybrid seed for crop production, the method comprising planting a male-sterile plant within pollination range of a male-fertile plant, wherein the male-sterile plant is
   [0686] a) a plant grown from male sterile plant seed obtained by the method of paragraph 77 or 78; and/or
   [0687] b) comprises:
      [0688] i) loss-of-function alleles of an endogenous MF gene at each of the native MF gene loci;
      [0689] ii) loss-of-function alleles of an endogenous PV gene at each of the native PV gene loci; and
      [0690] iii) two ectopic alleles of the PV gene at a target locus; and whereby the male-fertile plant pollinates the male-sterile plant and F1 hybrid seed is produced.
[0691] 82. The method of any of paragraphs 79-81, wherein the pollination range is 200 metres.
[0692] 83. The method of any of paragraphs 79-82, wherein the male-sterile plant and male fertile plant are different lines.
[0693] 84. A method of producing a plant crop, the method comprising:
   [0694] a) planting and/or harvesting a plant or portion thereof, wherein the plant:
      [0695] i) is plant grown from F1 hybrid seed obtained by the method of any of paragraphs 79-83; and/or
      [0696] ii) comprises:
         [0697] 1) in each genome of the plant, at a native MF gene locus, one functional endogenous allele of the endogenous MF gene and one loss-of-function allele of the endogenous MF gene;
         [0698] 2) in each genome of the plant, at a native PV gene locus, one functional endogenous allele of the endogenous PV gene and one loss-of-function allele of the endogenous PV gene;
         [0699] 3) one ectopic allele of the PV gene at a target locus.

[0700] In some embodiments, the present technology may be defined in any of the following numbered paragraphs:
[0701] 1. A male-fertile maintainer plant for a male-sterile polyploid plant comprising:
   [0702] a first genome comprising:
      [0703] on a first chromosome of a pair of homologous chromosomes, at a single target locus, at least one functional ectopic allele of a MF gene and at least one functional ectopic allele of a seed color gene (e.g., seed coat and/or seed endosperm gene) (or at least one functional ectopic allele of each member of a set of seed color genes);
      [0704] on a second chromosome of the pair of homologous chromosomes, at the target locus corresponding to the target locus of the first chromosome of the pair of homologous chromosomes, at least one functional ectopic allele of a PV gene;
      [0705] loss-of-function alleles of the endogenous MF genes at the native MF gene loci and loss-of-function alleles of the endogenous PV genes at the native PV gene loci.
[0706] 2. The male-fertile maintainer plant of paragraph 1, comprising at least one further genome, each of the further genomes comprising loss-of-function alleles of the endogenous MF genes at the native MF gene loci and loss-of-function alleles of the PV gene at the native PV gene loci.
[0707] 3. The male-fertile maintainer plant of paragraph 1 or 2, wherein the target locus is the native MF gene locus.
[0708] 4. The male-fertile maintainer plant of paragraph 1 or 2, wherein the target locus is the native PV gene locus.
[0709] 5. The male-fertile maintainer plant of paragraph 1 or 2, wherein the target locus is not the native MF gene locus or the native PV gene locus.
[0710] 6. The male-fertile maintainer plant of any one of the preceding paragraphs, wherein the ectopic allele of the MF gene and/or the ectopic allele of the PV gene is a nuclease-null allele.
[0711] 7. The male-fertile maintainer plant of any one of the preceding paragraphs, wherein the ectopic allele of the MF gene and/or the ectopic allele of the PV gene is a CRISPR-null allele.
[0712] 8. A male-fertile maintainer plant for a male-sterile polyploid plant comprising:
   [0713] a first genome comprising:
      [0714] on a first chromosome of a pair of homologous chromosomes, at least one functional allele of a MF gene at the MF gene locus and at least one allele of a seed color gene (e.g., seed coat and/or seed endosperm gene) (or at least one functional ectopic allele of each member of a set of seed color genes);
      [0715] on a second chromosome of the pair of homologous chromosomes, a loss-of-function allele of the MF gene at the MF gene locus and at least one ectopic functional allele of a PV gene;
      [0716] and loss-of-function alleles of the PV gene at the native PV gene loci; and
   [0717] at least one further genome, each of the further genomes comprising loss-of-function alleles of the MF gene at the native MF gene loci and loss-of-function alleles of the PV gene at the native PV gene loci.
[0718] 9. The plant of any one of the preceding paragraphs, wherein the at least one functional allele of a MF gene is the endogenous wild-type functional allele of the MF gene.
[0719] 10. The plant of any one of the preceding paragraphs, wherein the at least one functional allele of a MF gene is an ectopic copy of the MF gene.
[0720] 11. The plant of paragraph 10, wherein the at least one functional allele of a MF gene and the at least one allele of a seed color gene (e.g., seed coat and/or seed endosperm gene) (or at least one functional ectopic allele of each member of a set of seed color genes) are part of single construct.
[0721] 12. The plant of any one of the preceding paragraphs, wherein an ectopic allele or ectopic copy of a gene is a nuclease-null or CRISPR-null allele.
[0722] 13. The plant of any one of the preceding paragraphs, wherein the MF gene displays the same type of activity and shares at least 80%, at least 85%, at least 90%, at least 95%, or greater sequence identity with one or more of the genes of Table 1.
[0723] 14. The plant of paragraph 13, wherein the MF gene is selected from Table 1.
[0724] 15. The plant of any one of the preceding paragraphs, wherein the MF gene displays the same type of activity and shares at least 80%, at least 85%, at least 90%, at least 95%, or greater sequence identity with Mfw2.
[0725] 16. The plant of any one of the preceding paragraphs, wherein the MF gene is Mfw2.
[0726] 17. The plant of any one of the preceding paragraphs, wherein the PV gene displays the same type of activity and shares at least 80%, at least 85%, at least 90%, at least 95%, or greater sequence identity with one or more of the genes of Table 2.
[0727] 18. The plant of paragraph 17, wherein the PV gene is selected from Table 2.
[0728] 19. The plant of any one of the preceding paragraphs, wherein the PV gene displays the same type of activity and shares at least 80%, at least 85%, at least 90%, at least 95%, or greater sequence identity with PV1 or PV2.
[0729] 20. The plant of any one of the preceding paragraphs, wherein the PV gene is PV1 or PV2.
[0730] 21. The plant of any one of the preceding paragraphs, wherein the PV gene displays the same type of activity and shares at least 80%, at least 85%, at least 90%, at least 95%, or greater sequence identity with Ms1.
[0731] 22. The plant of any one of the preceding paragraphs, wherein the PV gene is Ms1.
[0732] 23. The plant of any one of the preceding paragraphs, wherein the PV gene displays the same type of activity and shares at least 80%, at least 85%, at least 90%, at least 95%, or greater sequence identity with PV3.
[0733] 24. The plant of any one of the preceding paragraphs, wherein the PV gene is PV3.
[0734] 25. The plant of any one of the preceding paragraphs, wherein the MF gene displays the same type of activity and shares at least 80%, at least 85%, at least 90%, at least 95%, or greater sequence identity with Mfw2 and the PV gene displays the same type of activity and shares at least 80%, at least 85%, at least 90%, at least 95%, or greater sequence identity with Ms1.
[0735] 26. The plant of any one of the preceding paragraphs, wherein the MF gene is Mfw2 and the PV gene is Ms1.
[0736] 27. The plant of any one of the preceding paragraphs, wherein the MF gene displays the same type of activity and shares at least 80%, at least 85%, at least 90%, at least 95%, or greater sequence identity with Mfw2 and the PV gene displays the same type of activity and shares at least 80%, at least 85%, at least 90%, at least 95%, or greater sequence identity with PV1.
[0737] 28. The plant of any one of the preceding paragraphs, wherein the MF gene is Mfw2 and the PV gene is PV1.
[0738] 29. The plant of any one of the preceding paragraphs, wherein the MF gene displays the same type of activity and shares at least 80%, at least 85%, at least 90%, at least 95%, or greater sequence identity with Mfw2 and the PV gene displays the same type of activity and shares at least 80%, at least 85%, at least 90%, at least 95%, or greater sequence identity with PV3.
[0739] 30. The plant of any one of the preceding paragraphs, wherein the MF gene is Mfw2 and the PV gene is PV3.
[0740] 31. The plant of any one of the preceding paragraphs, wherein the at least one allele of a seed color gene (e.g., seed coat and/or seed endosperm gene) (or at least one functional ectopic allele of each member of a set of seed color genes) is exogenous.
[0741] 32. The plant of any one of the preceding paragraphs, wherein the at least one allele of a seed color gene (e.g., seed coat and/or seed endosperm gene) is blue aleurone (BA).
[0742] 33. The plant of any one of the preceding paragraphs, wherein the at least one allele of a seed color gene (e.g., seed coat and/or seed endosperm gene) (or at least one functional ectopic allele of each member of a set of seed color genes) comprises sequences obtained from a species within the same genus as the plant.
[0743] 34. The plant of any one of the preceding paragraphs, wherein the at least one allele of a seed color gene (e.g., seed coat and/or seed endosperm gene) (or at least one functional ectopic allele of each member of a set of seed color genes) is located within 10 cM of the MF gene loci.
[0744] 35. The plant of any one of the preceding paragraphs, wherein the at least one allele of a seed color gene (e.g., seed coat and/or seed endosperm gene) (or at least one functional ectopic allele of each member of a set of seed color genes) is located within 1 cM of the MF gene loci.
[0745] 36. The plant of any one of the preceding paragraphs, wherein the at least one ectopic functional allele of a PV gene is located within 10 cM of the MF gene loci.
[0746] 37. The plant of any one of the preceding paragraphs, wherein the at least one ectopic functional allele of a PV gene is located within 1 cM of the MF gene loci.
[0747] 38. The plant of any one of the preceding paragraphs, wherein the only exogenous sequence in the genomes is the at least one allele of a seed color gene (e.g., seed coat and/or seed endosperm gene) (or at least one functional ectopic allele of each member of a set of seed color genes).
[0748] 39. The plant of any one of the preceding paragraphs, wherein the only ectopic sequence in the genomes is the at least one ectopic functional allele of a PV gene.
[0749] 40. The plant of any one of the preceding paragraphs, wherein the plant is tetraploid and the second genome comprises loss-of-function alleles of the MF gene at the native MF gene loci and loss-of-function alleles of the PV gene at the native PV gene loci.
[0750] 41. The plant of any one of the preceding paragraphs, wherein the plant is hexaploid and the second and third genomes both comprise loss-of-function alleles of the MF gene at the native MF gene loci and loss-of-function alleles of the PV gene at the native PV gene loci.
[0751] 42. The plant of any one of the preceding paragraphs, wherein a loss-of-function allele comprises an engineered knock-out modification.
[0752] 43. The plant of any one of the preceding paragraphs, wherein a loss-of-function allele comprises an engineered excision of at least part of a coding or regulatory sequence.
[0753] 44. The plant of any one of paragraphs 42-43, wherein the loss-of-function allele is engineered using a site-specific guided nuclease.
[0754] 45. The plant of paragraph 44, wherein the site-specific guided nuclease is a form of CRISPR-Cas (such as CRISPR-Cas9).
[0755] 46. The plant of any one of the preceding paragraphs, wherein the plant is wheat, triticale, canola/oilseed rape, indian mustard, barley, rice, oat, or rye.
[0756] 47. The plant of any one of the preceding paragraphs, wherein the plant is wheat.
[0757] 48. The plant of paragraph 41, wherein the at least one allele of a seed color gene (e.g., seed coat and/or seed endosperm gene) (or at least one functional ectopic allele of each member of a set of seed color genes) comprises a sequence from T. aestivum, T durum, T. monococcum or another Triticum aestivum-crossable species.
[0758] 49. The plant of any one of the preceding paragraphs, wherein the plant is hexaploid wheat or tetraploid wheat, Triticum aestivum, or Triticum durum.
[0759] 50. A method of preparing a male-fertile maintainer plant for a male-sterile polyploid plant, the method comprising engineering a plant to comprise:
   [0760] in a first genome:
      [0761] on a first chromosome of a pair of homologous chromosomes, at a single target locus, at least one functional ectopic allele of a MF gene and at least one functional ectopic allele of a seed color gene (e.g., seed coat and/or seed endosperm gene) (or at least one functional ectopic allele of each member of a set of seed color genes);
      [0762] on a second chromosome of the pair of homologous chromosomes, at the target locus corresponding to the target locus of the first chromosome of the pair of homologous chromosomes, at least one functional ectopic allele of a PV gene; and
      [0763] loss-of-function alleles of the endogenous MF genes at the native MF gene loci and loss-of-function alleles of the endogenous PV genes at the native PV gene loci.
[0764] 51. A method of preparing a male-fertile maintainer plant for a male-sterile polyploid plant, the method comprising, simultaneously or sequentially:
   [0765] inserting, on a first chromosome of a pair of homologous chromosomes in a first genome, at a single target locus, a construct comprising at least one functional ectopic allele of a MF gene and at least one functional ectopic allele of a seed color gene (e.g., seed coat and/or seed endosperm gene) (or at least one functional ectopic allele of each member of a set of seed color genes), optionally wherein the inserting comprises nuclease cleavage of the target locus (e.g., zinc-finger nuclease or CRISPR nuclease cleavage) and recombination or end-joining of the construct;
   [0766] inserting, on a second chromosome of the pair of homologous chromosomes in the first genome, at the target locus corresponding to the target locus of the first chromosome of the pair of homologous chromosomes, a construct comprising at least one functional ectopic allele of a PV gene, optionally wherein the inserting comprises nuclease cleavage of the target locus (e.g., zinc-finger nuclease or CRISPR nuclease cleavage) and/or recombination or end-joining of the construct; and
   [0767] mutating the the endogenous MF genes at the native MF gene loci and the endogenous PV genes at the native PV gene loci to create loss-of-function alleles, optionally wherein the loss-of-function alleles are caused by contacting the genome with a site-specific guided nuclease (e.g., CRISPR) and one or more guide RNA sequences or multi-guide constructs.
[0768] 52. A method of preparing a male-fertile maintainer plant for a male-sterile polyploid plant, the method comprising:
   [0769] i) inserting, on a first chromosome of a pair of homologous chromosomes in a first genome, at a single target locus, a cassette comprising in 5′ to 3′ or 3′ to 5′ order:
      [0770] a first recognition site for a first recombinase;
      [0771] at least one functional ectopic nuclease null allele of a MF gene and at least one functional ectopic allele of a seed color gene (e.g., seed coat and/or seed endosperm gene) (or at least one functional ectopic allele of each member of a set of seed color genes) in either relative order;
      [0772] a first recognition site for a second recombinase;
      [0773] a selection gene;
      [0774] a second recognition site for the first recombinase;
      [0775] at least one functional ectopic nuclease-null allele of a PV gene;
      [0776] a second recognition site for the second recombinase;
   thereby providing a full-cassette insertion plant;
   [0777] ii) contacting a first progeny of the full-cassette insertion plant, or a cell thereof, with the first recombinase,
   thereby excising:
      [0778] one recognition site for the first recombinase, the at least one functional ectopic nuclease null allele of a MF gene and at least one functional ectopic allele of a seed color gene (e.g., seed coat and/or seed endosperm gene) (or at least one functional ectopic allele of each member of a set of seed color genes), the first recognition site for the second recombinase, and the selection gene from the genome of the first progeny and
   thereby providing an excised first progeny comprising:
      [0779] one recognition site for the first recombinase, the at least one functional ectopic nuclease-null allele of a PV gene, and the second recognition site for the second recombinase portions of the construct;
   [0780] iii) contacting a second progeny of the full-cassette insertion plant, or a cell thereof, with the second recombinase, thereby excising:
      [0781] one recognition site for the second recombinase, the selection gene, the second recognition site for the first recombinase and at least one functional ectopic nuclease-null allele of a PV gene, and
   thereby providing an excised second progeny comprising:
      [0782] one recognition site for the second recombinase, the first recognition site for the first recombinase, and the at least one functional ectopic nuclease null allele of a MF gene and at least one functional ectopic allele of a seed color gene (e.g., seed coat and/or seed endosperm gene) (or at least one functional ectopic allele of each member of a set of seed color genes) portions of the construct;
   [0783] iv) crossing the excised first progeny provided in step ii) and the excised second progeny provided in step iii), thereby providing a third progeny comprising, in a first genome,
      [0784] on a first chromosome of a pair of homologous chromosomes, at a single target locus, the at least one functional ectopic nuclease-null allele of a MF gene and the at least one functional ectopic allele of a seed color gene (e.g., seed coat and/or seed endosperm gene) (or at least one functional ectopic allele of each member of a set of seed color genes);
      [0785] on a second chromosome of the pair of homologous chromosomes, at the target locus corresponding to the target locus of the first chromosome of the pair of homologous chromosomes, the at least one functional ectopic nuclease-null allele of a PV gene; and
   [0786] v) mutating the the endogenous MF genes at the native MF gene loci and the endogenous PV genes at the native PV gene loci to create loss-of-function alleles, optionally wherein the loss-of-function alleles are caused by contacting the genome with a site-specific guided nuclease (e.g., CRISPR) and one or more guide RNA sequences or multi-guide constructs, thereby providing the male-fertile maintainer plant.
[0787] 53. The method of paragraph 52, wherein one of first recombinase and second recombinase is Cre and the other recombinase is Flp.
[0788] 54. The method of any one of paragraphs 52-53, wherein the construct is a T-DNA construct.
[0789] 55. The method of any one of paragraphs 52-54, wherein one or more of the steps further comprise selection of the provided plants or cells, optionally wherein the selection is PCR selection.
[0790] 56. The method of any one of paragraphs 52-55, wherein the plant further comprises at least one further genome, and the method further comprises engineering loss-of-function alleles of the endogenous MF genes at the native MF gene loci and loss-of-function alleles of the PV gene at the native PV gene loci in each of the at least one further genomes.
[0791] 57. The method of any one of paragraphs 52-56, wherein the target locus is the native MF gene locus.
[0792] 58. The method of any one of paragraphs 52-57, wherein the target locus is the native PV gene locus.
[0793] 59. The method of any one of paragraphs 52-56, wherein the target locus is not the native MF gene locus or the native PV gene locus.
[0794] 60. The method of any one of the preceding paragraphs, wherein the ectopic allele of the MF gene and/or the ectopic allele of the PV gene is a nuclease-null allele.
[0795] 61. The method of any of the preceding paragraphs, wherein the ectopic allele of the MF gene and/or the ectopic allele of the PV gene is a CRISPR-null allele.
[0796] 62. The method of any of the preceding paragraphs, wherein the at least one functional allele of a MF gene is the endogenous wild-type functional allele of the MF gene.
[0797] 63. The method of any of the preceding paragraphs, wherein the at least one functional allele of a MF gene is an ectopic copy of the MF gene.
[0798] 64. The method of any of the preceding paragraphs, wherein the at least one functional allele of a MF gene and the at least one allele of a seed color gene (e.g., seed coat and/or seed endosperm gene) (or at least one functional ectopic allele of each member of a set of seed color genes) are part of single construct.
[0799] 65. The method of any of the preceding paragraphs, wherein an ectopic allele or ectopic copy of a gene is a nuclease-null or CRISPR-null allele.
[0800] 66. The method of any of the preceding paragraphs, wherein the MF gene displays the same type of activity and shares at least 80%, at least 85%, at least 90%, at least 95%, or greater sequence identity with one or more of the genes of Table 1.
[0801] 67. The method of paragraph 66, wherein the MF gene is selected from Table 1.
[0802] 68. The method of any of the preceding paragraphs, wherein the MF gene displays the same type of activity and shares at least 80%, at least 85%, at least 90%, at least 95%, or greater sequence identity with Mfw2.
[0803] 69. The method of any of the preceding paragraphs, wherein the MF gene is Mfw2.
[0804] 70. The method of any one of the preceding paragraphs, wherein the PV gene displays the same type of activity and shares at least 80%, at least 85%, at least 90%, at least 95%, or greater sequence identity with one or more of the genes of Table 2.
[0805] 71. The method of paragraph 70, wherein the PV gene is selected from Table 2.
[0806] 72. The method of any of the preceding paragraphs, wherein the PV gene displays the same type of activity and shares at least 80%, at least 85%, at least 90%, at least 95%, or greater sequence identity with PV1 or PV2.
[0807] 73. The method of any of the preceding paragraphs, wherein the PV gene is PV1 or PV2.
[0808] 74. The method of any one of the preceding paragraphs, wherein the PV gene displays the same type of activity and shares at least 80%, at least 85%, at least 90%, at least 95%, or greater sequence identity with Ms1.
[0809] 75. The method of any one of the preceding paragraphs, wherein the PV gene is Ms1.
[0810] 76. The method of any one of the preceding paragraphs, wherein the PV gene displays the same type of activity and shares at least 80%, at least 85%, at least 90%, at least 95%, or greater sequence identity with PV3.
[0811] 77. The method of any one of the preceding paragraphs, wherein the PV gene is PV3.
[0812] 78. The method of any one of the preceding paragraphs, wherein the MF gene displays the same type of activity and shares at least 80%, at least 85%, at least 90%, at least 95%, or greater sequence identity with Mfw2 and the PV gene displays the same type of activity and shares at least 80%, at least 85%, at least 90%, at least 95%, or greater sequence identity with Ms1.
[0813] 79. The method of any one of the preceding paragraphs, wherein the MF gene is Mfw2 and the PV gene is Ms1.
[0814] 80. The method of any one of the preceding paragraphs, wherein the MF gene displays the same type of activity and shares at least 80%, at least 85%, at least 90%, at least 95%, or greater sequence identity with Mfw2 and the PV gene displays the same type of activity and shares at least 80%, at least 85%, at least 90%, at least 95%, or greater sequence identity with PV1.
[0815] 81. The method of any one of the preceding paragraphs, wherein the MF gene is Mfw2 and the PV gene is PV1.
[0816] 82. The method of any one of the preceding paragraphs, wherein the MF gene displays the same type of activity and shares at least 80%, at least 85%, at least 90%, at least 95%, or greater sequence identity with Mfw2 and the PV gene displays the same type of activity and shares at least 80%, at least 85%, at least 90%, at least 95%, or greater sequence identity with PV3.
[0817] 83. The method of any one of the preceding paragraphs, wherein the MF gene is Mfw2 and the PV gene is PV3.
[0818] 84. The method of any of the preceding paragraphs, wherein the at least one allele of a seed color gene (e.g., seed coat and/or seed endosperm gene) (or at least one functional ectopic allele of each member of a set of seed color genes) is exogenous.
[0819] 85. The method of any of the preceding paragraphs, wherein the at least one allele of a seed color gene (e.g., seed coat and/or seed endosperm gene) is blue aleurone (BA).
[0820] 86. The method of any of the preceding paragraphs, wherein the at least one allele of a seed color gene (e.g., seed coat and/or seed endosperm gene) (or at least one functional ectopic allele of each member of a set of seed color genes) comprises sequences obtained from a species within the same genus as the plant.
[0821] 87. The method of any of the preceding paragraphs, wherein the at least one allele of a seed color gene (e.g., seed coat and/or seed endosperm gene) (or at least one functional ectopic allele of each member of a set of seed color genes) is located within 10 cM of the MF gene loci.
[0822] 88. The method of any of the preceding paragraphs, wherein the at least one allele of a seed color gene (e.g., seed coat and/or seed endosperm gene) (or at least one functional ectopic allele of each member of a set of seed color genes) is located within 1 cM of the MF gene loci.
[0823] 89. The method of any of the preceding paragraphs, wherein the at least one ectopic functional allele of a PV gene is located within 10 cM of the MF gene loci.
[0824] 90. The method of any of the preceding paragraphs, wherein the at least one ectopic functional allele of a PV gene is located within 1 cM of the MF gene loci.
[0825] 91. The method of any of the preceding paragraphs, wherein the only exogenous sequence in the genomes is the at least one allele of a seed color gene (e.g., seed coat and/or seed endosperm gene) (or at least one functional ectopic allele of each member of a set of seed color genes).
[0826] 92. The method of any of the preceding paragraphs, wherein the only ectopic sequence in the genomes is the at least one ectopic functional allele of a PV gene.
[0827] 93. The method of any of the preceding paragraphs, wherein the plant is tetraploid and the second genome comprises loss-of-function alleles of the MF gene at the native MF gene loci and loss-of-function alleles of the PV gene at the native PV gene loci.
[0828] 94. The method of any of the preceding paragraphs, wherein the plant is hexaploid and the second and third genomes both comprise loss-of-function alleles of the MF gene at the native MF gene loci and loss-of-function alleles of the PV gene at the native PV gene loci.
[0829] 95. The method of any of the preceding paragraphs, wherein a loss-of-function allele comprises an engineered knock-out modification.
[0830] 96. The method of any of the preceding paragraphs, wherein a loss-of-function allele comprises an engineered excision of at least part of a coding or regulatory sequence.
[0831] 97. The method of any of paragraphs 95-96, wherein the loss-of-function allele is engineered using a site-specific guided nuclease.
[0832] 98. The method of paragraph 97, wherein the site-specific guided nuclease is a form of CRISPR-Cas (such as CRISPR-Cas9).
[0833] 99. The method of any of the preceding paragraphs, wherein the plant is wheat, triticale, canola/oilseed rape, indian mustard, barley, rice, oat, or rye.
[0834] 100. The method of any of the preceding paragraphs, wherein the plant is wheat.
[0835] 101. The method of paragraph 100, wherein the at least one allele of a seed color gene (e.g., seed coat and/or seed endosperm gene) (or at least one functional ectopic allele of each member of a set of seed color genes) comprises a sequence from T. aestivum, T durum, T. monococcum or another Triticum aestivum-crossable species.
[0836] 102. The method of any of the preceding paragraphs, wherein the plant is hexaploid wheat or tetraploid wheat, Triticum aestivum, or Triticum durum.
[0837] 103. The method of any of the preceding paragraphs, wherein the at least one functional ectopic allele of a MF gene and at least one functional ectopic allele of a seed color gene (e.g., seed coat and/or seed endosperm gene) (or at least one functional ectopic allele of each member of a set of seed color genes) comprises the sequence of SEQ ID NO: 173 or a sequence with at least 80%, 85%, 90%, or 95% sequence identity thereto; and/or wherein the at least one functional ectopic allele of a PV gene comprises the sequence of SEQ ID NO: 172 or 218 or a sequence with at least 80%, 85%, 90%, or 95% sequence identity thereto.
[0838] 104. The method of any of the preceding paragraphs, wherein the guide RNA sequences and/or multi-guide constructs comprise one or more of SEQ ID NOs: 22-29, 131-154, 156, 210-213, or 217.
[0839] 105. A method of providing a male sterile plant seed, the method comprising selecting, from seed produced by selfing a plant of any one of paragraphs 1-49, seed not displaying a phenotype provided by the seed endosperm gene.
[0840] 106. A method of providing male sterile plant seed, the method comprising selfing a plant of any one of paragraphs 1-49, whereby the resulting seed not displaying a phenotype provided by the seed endosperm gene is the male sterile plant seed.
[0841] 107. A method of providing a F1 hybrid seed for crop production, the method comprising collecting the seed produced by a male-sterile plant pollinated by a male-fertile plant, wherein the male-sterile plant is
   [0842] a) a plant grown from male sterile plant seed obtained by the method of paragraph 105 or 106; and/or
   [0843] b) comprises:
      [0844] i) loss-of-function alleles of an endogenous MF gene at each of the native MF gene loci;
      [0845] ii) loss-of-function alleles of an endogenous PV gene at each of the native PV gene loci; and
      [0846] iii) two ectopic alleles of the PV gene at a target locus.
[0847] 108. A method of providing a F1 hybrid seed for crop production, the method comprising crossing a a male-sterile plant with a male-fertile plant, wherein the male-sterile plant is
[0848] a) a plant grown from male sterile plant seed obtained by the method of paragraph 105 or 106; and/or
[0849] b) comprises:
   [0850] i) loss-of-function alleles of an endogenous MF gene at each of the native MF gene loci;
   [0851] ii) loss-of-function alleles of an endogenous PV gene at each of the native PV gene loci; and
   [0852] iii) two ectopic alleles of the PV gene at a target locus.
[0853] 109. A method of providing a F1 hybrid seed for crop production, the method comprising planting a male-sterile plant within pollination range of a male-fertile plant, wherein the male-sterile plant is
   [0854] a) a plant grown from male sterile plant seed obtained by the method of paragraph 105 or 106; and/or
   [0855] b) comprises:
      [0856] i) loss-of-function alleles of an endogenous MF gene at each of the native MF gene loci;
      [0857] ii) loss-of-function alleles of an endogenous PV gene at each of the native PV gene loci; and
      [0858] iii) two ectopic alleles of the PV gene at a target locus; and
   [0859] whereby the male-fertile plant pollinates the male-sterile plant and F1 hybrid seed is produced.
[0860] 110. The method of paragraph 105-109, wherein the pollination range is 200 metres.
[0861] 111. The method of any of paragraphs 105-110, wherein the male-sterile plant and male fertile plant are different lines.
[0862] 112. A method of producing a plant crop, the method comprising:
   [0863] a) planting and/or harvesting a plant or portion thereof, wherein the plant:
      [0864] i) is plant grown from F1 hybrid seed obtained by the method of any of paragraphs 107-111; and/or
      [0865] ii) comprises:
         [0866] 1) in each genome of the plant, at a native MF gene locus, one functional endogenous allele of the endogenous MF gene and one loss-of-function allele of the endogenous MF gene;
         [0867] 2) in each genome of the plant, at a native PV gene locus, one functional endogenous allele of the endogenous PV gene and one loss-of-function allele of the endogenous PV gene;
         [0868] 3) one ectopic allele of the PV gene at a target locus.

[0869] In some embodiments, the present technology may be defined in any of the following numbered paragraphs:
[0870] 1. A male-fertile maintainer plant for a male-sterile polyploid plant comprising:
   [0871] a first genome comprising:
      [0872] on a first chromosome of a pair of homologous chromosomes, at a single target locus, at least one functional ectopic allele of a MF gene and at least one functional ectopic allele of a seed color gene (e.g., seed coat and/or seed endosperm gene) (or at least one functional ectopic allele of each member of a set of seed color genes);
      [0873] on a second chromosome of the pair of homologous chromosomes, at the target locus corresponding to the target locus of the first chromosome of the pair of homologous chromosomes, at least one functional ectopic allele of a PV gene;
      [0874] loss-of-function alleles of the endogenous MF genes at the native MF gene loci and loss-of-function alleles of the endogenous PV genes at the native PV gene loci.
[0875] 2. The male-fertile maintainer plant of paragraph 1, comprising at least one further genome, each of the further genomes comprising loss-of-function alleles of the endogenous MF genes at the native MF gene loci and loss-of-function alleles of the PV gene at the native PV gene loci.
[0876] 3. The male-fertile maintainer plant of paragraph 1 or 2, wherein the target locus is the native MF gene locus.
[0877] 4. The male-fertile maintainer plant of paragraph 1 or 2, wherein the target locus is the native PV gene locus.
[0878] 5. The male-fertile maintainer plant of paragraph 1 or 2, wherein the target locus is not the native MF gene locus or the native PV gene locus.
[0879] 6. The male-fertile maintainer plant of any one of the preceding paragraphs, wherein the ectopic allele of the MF gene and/or the ectopic allele of the PV gene is a nuclease-null allele.
[0880] 7. The male-fertile maintainer plant of any one of the preceding paragraphs, wherein the ectopic allele of the MF gene and/or the ectopic allele of the PV gene is a CRISPR-null allele.
[0881] 8. A male-fertile maintainer plant for a male-sterile polyploid plant comprising: a first genome comprising:
   [0882] on a first chromosome of a pair of homologous chromosomes, at least one functional allele of a MF gene at the MF gene locus and at least one allele of a seed color gene (e.g., seed coat and/or seed endosperm gene) (or at least one functional ectopic allele of each member of a set of seed color genes);
   [0883] on a second chromosome of the pair of homologous chromosomes, a loss-of-function allele of the MF gene at the MF gene locus and at least one ectopic functional allele of a PV gene;
   [0884] and loss-of-function alleles of the PV gene at the native PV gene loci; and
at least one further genome, each of the further genomes comprising loss-of-function alleles of the MF gene at the native MF gene loci and loss-of-function alleles of the PV gene at the native PV gene loci.
[0885] 9. The plant of any one of the preceding paragraphs, wherein the at least one functional allele of a MF gene is the endogenous wild-type functional allele of the MF gene.
[0886] 10. The plant of any one of the preceding paragraphs, wherein the at least one functional allele of a MF gene is an ectopic copy of the MF gene.
[0887] 11. The plant of paragraph 10, wherein the at least one functional allele of a MF gene and the at least one allele of a seed color gene (e.g., seed coat and/or seed endosperm gene) (or at least one functional ectopic allele of each member of a set of seed color genes) are part of single construct.
[0888] 12. The plant of any one of the preceding paragraphs, wherein an ectopic allele or ectopic copy of a gene is a nuclease-null or CRISPR-null allele.
[0889] 13. The plant of any one of the preceding paragraphs, wherein the MF gene displays the same type of activity and shares at least 80%, at least 85%, at least 90%, at least 95%, or greater sequence identity with one or more of the genes of Table 1.
[0890] 14. The plant of paragraph 13, wherein the MF gene is selected from Table 1.
[0891] 15. The plant of any one of the preceding paragraphs, wherein the MF gene displays the same type of activity and shares at least 80%, at least 85%, at least 90%, at least 95%, or greater sequence identity with Mfw2.
[0892] 16. The plant of any one of the preceding paragraphs, wherein the MF gene is Mfw2.
[0893] 17. The plant of any one of the preceding paragraphs, wherein the PV gene displays the same type of activity and shares at least 80%, at least 85%, at least 90%, at least 95%, or greater sequence identity with one or more of the genes of Table 2.
[0894] 18. The plant of paragraph 17, wherein the PV gene is selected from Table 2.
[0895] 19. The plant of any one of the preceding paragraphs, wherein the PV gene displays the same type of activity and shares at least 80%, at least 85%, at least 90%, at least 95%, or greater sequence identity with PV1 or PV2.
[0896] 20. The plant of any one of the preceding paragraphs, wherein the PV gene is PV1 or PV2.
[0897] 21. The plant of any one of the preceding paragraphs, wherein the PV gene displays the same type of activity and shares at least 80%, at least 85%, at least 90%, at least 95%, or greater sequence identity with Ms1.
[0898] 22. The plant of any one of the preceding paragraphs, wherein the PV gene is Ms1.
[0899] 23. The plant of any one of the preceding paragraphs, wherein the PV gene displays the same type of activity and shares at least 80%, at least 85%, at least 90%, at least 95%, or greater sequence identity with PV3.
[0900] 24. The plant of any one of the preceding paragraphs, wherein the PV gene is PV3.
[0901] 25. The plant of any one of the preceding paragraphs, wherein the MF gene displays the same type of activity and shares at least 80%, at least 85%, at least 90%, at least 95%, or greater sequence identity with Mfw2 and the PV gene displays the same type of activity and shares at least 80%, at least 85%, at least 90%, at least 95%, or greater sequence identity with Ms1.
[0902] 26. The plant of any one of the preceding paragraphs, wherein the MF gene is Mfw2 and the PV gene is Ms1.
[0903] 27. The plant of any one of the preceding paragraphs, wherein the MF gene displays the same type of activity and shares at least 80%, at least 85%, at least 90%, at least 95%, or greater sequence identity with Mfw2 and the PV gene displays the same type of activity and shares at least 80%, at least 85%, at least 90%, at least 95%, or greater sequence identity with PV1.
[0904] 28. The plant of any one of the preceding paragraphs, wherein the MF gene is Mfw2 and the PV gene is PV1.
[0905] 29. The plant of any one of the preceding paragraphs, wherein the MF gene displays the same type of activity and shares at least 80%, at least 85%, at least 90%, at least 95%, or greater sequence identity with Mfw2 and the PV gene displays the same type of activity and shares at least 80%, at least 85%, at least 90%, at least 95%, or greater sequence identity with PV3.
[0906] 30. The plant of any one of the preceding paragraphs, wherein the MF gene is Mfw2 and the PV gene is PV3.
[0907] 31. The plant of any one of the preceding paragraphs, wherein the at least one allele of a seed color gene (e.g., seed coat and/or seed endosperm gene) (or at least one functional ectopic allele of each member of a set of seed color genes) is exogenous.
[0908] 32. The plant of any one of the preceding paragraphs, wherein the at least one allele of a seed color gene (e.g., seed coat and/or seed endosperm gene) is blue aleurone (BA).
[0909] 33. The plant of any one of the preceding paragraphs, wherein the at least one allele of a seed color gene (e.g., seed coat and/or seed endosperm gene) (or at least one functional ectopic allele of each member of a set of seed color genes) comprises sequences obtained from a species within the same genus as the plant.
[0910] 34. The plant of any one of the preceding paragraphs, wherein the at least one allele of a seed color gene (e.g., seed coat and/or seed endosperm gene) (or at least one functional ectopic allele of each member of a set of seed color genes) is located within 10 cM of the MF gene loci.
[0911] 35. The plant of any one of the preceding paragraphs, wherein the at least one allele of a seed color gene (e.g., seed coat and/or seed endosperm gene) (or at least one functional ectopic allele of each member of a set of seed color genes) is located within 1 cM of the MF gene loci.
[0912] 36. The plant of any one of the preceding paragraphs, wherein the at least one ectopic functional allele of a PV gene is located within 10 cM of the MF gene loci.
[0913] 37. The plant of any one of the preceding paragraphs, wherein the at least one ectopic functional allele of a PV gene is located within 1 cM of the MF gene loci.
[0914] 38. The plant of any one of the preceding paragraphs, wherein the only exogenous sequence in the genomes is the at least one allele of a seed color gene (e.g., seed coat and/or seed endosperm gene) (or at least one functional ectopic allele of each member of a set of seed color genes).
[0915] 39. The plant of any one of the preceding paragraphs, wherein the only ectopic sequence in the genomes is the at least one ectopic functional allele of a PV gene.
[0916] 40. The plant of any one of the preceding paragraphs, wherein the plant is tetraploid and the second genome comprises loss-of-function alleles of the MF gene at the native MF gene loci and loss-of-function alleles of the PV gene at the native PV gene loci.
[0917] 41. The plant of any one of the preceding paragraphs, wherein the plant is hexaploid and the second and third genomes both comprise loss-of-function alleles of the MF gene at the native MF gene loci and loss-of-function alleles of the PV gene at the native PV gene loci.
[0918] 42. The plant of any one of the preceding paragraphs, wherein a loss-of-function allele comprises an engineered knock-out modification.
[0919] 43. The plant of any one of the preceding paragraphs, wherein a loss-of-function allele comprises an engineered excision of at least part of a coding or regulatory sequence.
[0920] 44. The plant of any one of paragraphs 42-43, wherein the loss-of-function allele is engineered using a site-specific guided nuclease.
[0921] 45. The plant of paragraph 44, wherein the site-specific guided nuclease is a form of CRISPR-Cas (such as CRISPR-Cas9).
[0922] 46. The plant of any one of the preceding paragraphs, wherein the plant is wheat, triticale, canola/oilseed rape, indian mustard, barley, rice, oat, or rye.
[0923] 47. The plant of any one of the preceding paragraphs, wherein the plant is wheat.
[0924] 48. The plant of paragraph 41, wherein the at least one allele of a seed color gene (e.g., seed coat and/or seed endosperm gene) (or at least one functional ectopic allele of each member of a set of seed color genes) comprises a sequence from T. aestivum, T durum, T. monococcum or another Triticum aestivum-crossable species.
[0925] 49. The plant of any one of the preceding paragraphs, wherein the plant is hexaploid wheat or tetraploid wheat, Triticum aestivum, or Triticum durum.
[0926] 50. A method of preparing a male-fertile maintainer plant for a male-sterile polyploid plant, the method comprising engineering a plant to comprise:
   [0927] in a first genome:
      [0928] on a first chromosome of a pair of homologous chromosomes, at a single target locus, at least one functional ectopic allele of a MF gene and at least one functional ectopic allele of a seed color gene (e.g., seed coat and/or seed endosperm gene) (or at least one functional ectopic allele of each member of a set of seed color genes);
      [0929] on a second chromosome of the pair of homologous chromosomes, at the target locus corresponding to the target locus of the first chromosome of the pair of homologous chromosomes, at least one functional ectopic allele of a PV gene; and
      [0930] loss-of-function alleles of the endogenous MF genes at the native MF gene loci and loss-of-function alleles of the endogenous PV genes at the native PV gene loci.
[0931] 51. A method of preparing a male-fertile maintainer plant for a male-sterile polyploid plant, the method comprising, simultaneously or sequentially:
   [0932] inserting, on a first chromosome of a pair of homologous chromosomes in a first genome, at a single target locus, a construct comprising at least one functional ectopic allele of a MF gene and at least one functional ectopic allele of a seed color gene (e.g., seed coat and/or seed endosperm gene) (or at least one functional ectopic allele of each member of a set of seed color genes), optionally wherein the inserting comprises nuclease cleavage of the target locus (e.g., zinc-finger nuclease or CRISPR nuclease cleavage) and recombination or end-joining of the construct;
   [0933] inserting, on a second chromosome of the pair of homologous chromosomes in the first genome, at the target locus corresponding to the target locus of the first chromosome of the pair of homologous chromosomes, a construct comprising at least one functional ectopic allele of a PV gene, optionally wherein the inserting comprises nuclease cleavage of the target locus (e.g., zinc-finger nuclease or CRISPR nuclease cleavage) and/or recombination or end-joining of the construct; and
   [0934] mutating the the endogenous MF genes at the native MF gene loci and the endogenous PV genes at the native PV gene loci to create loss-of-function alleles, optionally wherein the loss-of-function alleles are caused by contacting the genome with a site-specific guided nuclease (e.g., CRISPR) and one or more guide RNA sequences or multi-guide constructs.
[0935] 52. A method of preparing a male-fertile maintainer plant for a male-sterile polyploid plant, the method comprising:
   [0936] i) inserting, on a first chromosome of a pair of homologous chromosomes in a first genome, at a single target locus, a cassette comprising in 5′ to 3′ or 3′ to 5′ order:
      [0937] a first recognition site for a first recombinase;
      [0938] at least one functional ectopic nuclease null allele of a MF gene and at least one functional ectopic allele of a seed color gene (e.g., seed coat and/or seed endosperm gene) (or at least one functional ectopic allele of each member of a set of seed color genes) in either relative order;
      [0939] a first recognition site for a second recombinase;
      [0940] a selection gene;
      [0941] a second recognition site for the first recombinase;
      [0942] at least one functional ectopic nuclease-null allele of a PV gene;
      [0943] a second recognition site for the second recombinase;
   thereby providing a full-cassette insertion plant;
   [0944] ii) contacting a first progeny of the full-cassette insertion plant, or a cell thereof, with the first recombinase,
   thereby excising:
      [0945] one recognition site for the first recombinase, the at least one functional ectopic nuclease null allele of a MF gene and at least one functional ectopic allele of a seed color gene (e.g., seed coat and/or seed endosperm gene) (or at least one functional ectopic allele of each member of a set of seed color genes), the first recognition site for the second recombinase, and the selection gene from the genome of the first progeny and
   thereby providing an excised first progeny comprising:
      [0946] one recognition site for the first recombinase, the at least one functional ectopic nuclease-null allele of a PV gene, and the second recognition site for the second recombinase portions of the construct;
   [0947] iii) contacting a second progeny of the full-cassette insertion plant, or a cell thereof, with the second recombinase,
   thereby excising:
      [0948] one recognition site for the second recombinase, the selection gene, the second recognition site for the first recombinase and at least one functional ectopic nuclease-null allele of a PV gene, and
   thereby providing an excised second progeny comprising:
      [0949] one recognition site for the second recombinase, the first recognition site for the first recombinase, and the at least one functional ectopic nuclease null allele of a MF gene and at least one functional ectopic allele of a seed color gene (e.g., seed coat and/or seed endosperm gene) (or at least one functional ectopic allele of each member of a set of seed color genes) portions of the construct;
   [0950] iv) crossing the excised first progeny provided in step ii) and the excised second progeny provided in step iii), thereby providing a third progeny comprising, in a first genome,
      [0951] on a first chromosome of a pair of homologous chromosomes, at a single target locus, the at least one functional ectopic nuclease-null allele of a MF gene and the at least one functional ectopic allele of a seed color gene (e.g., seed coat and/or seed endosperm gene) (or at least one functional ectopic allele of each member of a set of seed color genes);
      [0952] on a second chromosome of the pair of homologous chromosomes, at the target locus corresponding to the target locus of the first chromosome of the pair of homologous chromosomes, the at least one functional ectopic nuclease-null allele of a PV gene; and
   [0953] v) mutating the the endogenous MF genes at the native MF gene loci and the endogenous PV genes at the native PV gene loci to create loss-of-function alleles, optionally wherein the loss-of-function alleles are caused by contacting the genome with a site-specific guided nuclease (e.g., CRISPR) and one or more guide RNA sequences or multi-guide constructs, thereby providing the male-fertile maintainer plant.
[0954] 53. The method of paragraph 52, wherein one of first recombinase and second recombinase is Cre and the other recombinase is Flp.
[0955] 54. The method of any one of paragraphs 52-53, wherein the construct is a T-DNA construct.
[0956] 55. The method of any one of paragraphs 52-54, wherein one or more of the steps further comprise selection of the provided plants or cells, optionally wherein the selection is PCR selection.
[0957] 56. The method of any one of paragraphs 52-55, wherein the plant further comprises at least one further genome, and the method further comprises engineering loss-of-function alleles of the endogenous MF genes at the native MF gene loci and loss-of-function alleles of the PV gene at the native PV gene loci in each of the at least one further genomes.
[0958] 57. The method of any one of paragraphs 52-56, wherein the target locus is the native MF gene locus.
[0959] 58. The method of any one of paragraphs 52-57, wherein the target locus is the native PV gene locus.
[0960] 59. The method of any one of paragraphs 52-56, wherein the target locus is not the native MF gene locus or the native PV gene locus.
[0961] 60. A method of preparing a male-fertile maintainer plant for a male-sterile polyploid plant, the method comprising:
   [0962] i) contacting a cell comprising a PV locus in a first chromosome and a second chromosome of a pair of homologous chromosomes in a first genome, with:
      [0963] 1) a site-specific guided nuclease (e.g., CRISPR);
      [0964] 2) one or more guide RNA sequences or multi-guide constructs specific to one or more sequences at the PV locus; and
      [0965] 3) an targeting insertion cassette comprising in 5′ to 3′ or 3′ to 5′ order: a first recognition site for a first recombinase and a second recognition site for the first recombinase;
   thereby providing a targeting insertion plant;
   [0966] ii) contacting the targeting insertion plant, or first progeny of the targeting insertion plant, or a cell thereof with the first recombinase and a cassette comprising in 5′ to 3′ or 3′ to 5′ order:
      [0967] 1) a first recombination site for the first recombinase;
      [0968] 2) at least one functional ectopic nuclease null allele of a MF gene and at least one functional ectopic allele of a seed color gene (e.g., seed coat and/or seed endosperm gene) (or at least one functional ectopic allele of each member of a set of seed color genes) in either relative order; and
      [0969] 3) a second recombination site for the first recombinase;
   thereby providing a cassette insertion plant;
   [0970] iii) selecting a cassette insertion plant comprising a cassette insertion at one allele of the PV locus, or crossing a cassette insertion plant comprising a cassette insertion at both alleles of the PV locus with a plant with a functional PV allele at the PV locus,
   thereby providing a cassette insertion plant with a cassette insertion at one PV allele in the first genome and a functional PV allele at the second PV allele in the first genome,
   [0971] iv) contacting the cassette insertion plant selected in iii), or a first progeny or cell thereof, with:
      [0972] 1) a site-specific guided nuclease (e.g., CRISPR);
      [0973] 2) one or more guide RNA sequences or multi-guide constructs flanking the insertion sites, thereby excising the inserted recombination sites;
      [0974] 3) one or more guide RNA sequences or multi-guide constructs specific to the functional endogenous MF genes and/or flanking the functional endogenous MF genes, thereby mutating the functional endogenous MF genes at the functional native MF gene loci to create loss-of-function alleles;
thereby providing the male-fertile maintainer plant.
[0975] 61. The method of paragraph 60, wherein the contacting of step i) comprises biolistic delivery or integration.
[0976] 62. The method of any of paragraphs 60-61, wherein the contacting of step ii) comprises transforming the plant, progeny, or cell thereof with one or more T-DNAs comprising the recombinase and cassette.
[0977] 63. The method of paragraph 62, wherein the method further comprises a step v) of segregating remaining T-DNA out of the plant or plant cells.
[0978] 64. The method of any of paragraphs 60-64, wherein the PV gene is endogenously expressed only from the first genome.
[0979] 65. The method of paragraph 64, wherein the PV gene is Ms1.
[0980] 66. The method of paragraph 65, wherein the one or more sequences at the PV locus are one or more of the three gRNA sequences of SEQ ID NOs: 235-237.
[0981] 67. The method of any of paragraphs 60-63, wherein the PV genes is endogenously expressed from the first genome and at least one further genome and in step iv) the plant, first progeny, or cell thereof is further contacted with one or more guide RNA sequences or multi-guide constructs specific to the endogenous PV genes and/or flanking the endogenous PV genes, thereby mutating the endogenous PV genes at the native PV gene loci to create loss-of-function alleles.
[0982] 68. The method of any one of the preceding paragraphs, wherein the ectopic allele of the MF gene and/or the ectopic allele of the PV gene is a nuclease-null allele.
[0983] 69. The method of any of the preceding paragraphs, wherein the ectopic allele of the MF gene and/or the ectopic allele of the PV gene is a CRISPR-null allele.
[0984] 70. The method of any of the preceding paragraphs, wherein the at least one functional allele of a MF gene is the endogenous wild-type functional allele of the MF gene.
[0985] 71. The method of any of the preceding paragraphs, wherein the at least one functional allele of a MF gene is an ectopic copy of the MF gene.
[0986] 72. The method of any of the preceding paragraphs, wherein the at least one functional allele of a MF gene and the at least one allele of a seed color gene (e.g., seed coat and/or seed endosperm gene) (or at least one functional ectopic allele of each member of a set of seed color genes) are part of single construct.
[0987] 73. The method of any of the preceding paragraphs, wherein an ectopic allele or ectopic copy of a gene is a nuclease-null or CRISPR-null allele.
[0988] 74. The method of any of the preceding paragraphs, wherein the MF gene displays the same type of activity and shares at least 80%, at least 85%, at least 90%, at least 95%, or greater sequence identity with one or more of the genes of Table 1.
[0989] 75. The method of paragraph 74, wherein the MF gene is selected from Table 1.
[0990] 76. The method of any of the preceding paragraphs, wherein the MF gene displays the same type of activity and shares at least 80%, at least 85%, at least 90%, at least 95%, or greater sequence identity with Mfw2.
[0991] 77. The method of any of the preceding paragraphs, wherein the MF gene is Mfw2.
[0992] 78. The method of any one of the preceding paragraphs, wherein the PV gene displays the same type of activity and shares at least 80%, at least 85%, at least 90%, at least 95%, or greater sequence identity with one or more of the genes of Table 2.
[0993] 79. The method of paragraph 78, wherein the PV gene is selected from Table 2.
[0994] 80. The method of any of the preceding paragraphs, wherein the PV gene displays the same type of activity and shares at least 80%, at least 85%, at least 90%, at least 95%, or greater sequence identity with PV1 or PV2.
[0995] 81. The method of any of the preceding paragraphs, wherein the PV gene is PV1 or PV2.
[0996] 82. The method of any one of the preceding paragraphs, wherein the PV gene displays the same type of activity and shares at least 80%, at least 85%, at least 90%, at least 95%, or greater sequence identity with Ms1.
[0997] 83. The method of any one of the preceding paragraphs, wherein the PV gene is Ms1.
[0998] 84. The method of any one of the preceding paragraphs, wherein the PV gene displays the same type of activity and shares at least 80%, at least 85%, at least 90%, at least 95%, or greater sequence identity with PV3.
[0999] 85. The method of any one of the preceding paragraphs, wherein the PV gene is PV3.
[1000] 86. The method of any one of the preceding paragraphs, wherein the MF gene displays the same type of activity and shares at least 80%, at least 85%, at least 90%, at least 95%, or greater sequence identity with Mfw2 and the PV gene displays the same type of activity and shares at least 80%, at least 85%, at least 90%, at least 95%, or greater sequence identity with Ms1.
[1001] 87. The method of any one of the preceding paragraphs, wherein the MF gene is Mfw2 and the PV gene is Ms1.
[1002] 88. The method of any one of the preceding paragraphs, wherein the MF gene displays the same type of activity and shares at least 80%, at least 85%, at least 90%, at least 95%, or greater sequence identity with Mfw2 and the PV gene displays the same type of activity and shares at least 80%, at least 85%, at least 90%, at least 95%, or greater sequence identity with PV1.
[1003] 89. The method of any one of the preceding paragraphs, wherein the MF gene is Mfw2 and the PV gene is PV1.
[1004] 90. The method of any one of the preceding paragraphs, wherein the MF gene displays the same type of activity and shares at least 80%, at least 85%, at least 90%, at least 95%, or greater sequence identity with Mfw2 and the PV gene displays the same type of activity and shares at least 80%, at least 85%, at least 90%, at least 95%, or greater sequence identity with PV3.
[1005] 91. The method of any one of the preceding paragraphs, wherein the MF gene is Mfw2 and the PV gene is PV3.
[1006] 92. The method of any of the preceding paragraphs, wherein the at least one allele of a seed color gene (e.g., seed coat and/or seed endosperm gene) (or at least one functional ectopic allele of each member of a set of seed color genes) is exogenous.
[1007] 93. The method of any of the preceding paragraphs, wherein the at least one allele of a seed color gene (e.g., seed coat and/or seed endosperm gene) is blue aleurone (BA).
[1008] 94. The method of any of the preceding paragraphs, wherein the at least one allele of a seed color gene (e.g., seed coat and/or seed endosperm gene) (or at least one functional ectopic allele of each member of a set of seed color genes) comprises sequences obtained from a species within the same genus as the plant.
[1009] 95. The method of any of the preceding paragraphs, wherein the at least one allele of a seed color gene (e.g., seed coat and/or seed endosperm gene) (or at least one functional ectopic allele of each member of a set of seed color genes) is located within 10 cM of the MF gene loci.
[1010] 96. The method of any of the preceding paragraphs, wherein the at least one allele of a seed color gene (e.g., seed coat and/or seed endosperm gene) (or at least one functional ectopic allele of each member of a set of seed color genes) is located within 1 cM of the MF gene loci.
[1011] 97. The method of any of the preceding paragraphs, wherein the at least one ectopic functional allele of a PV gene is located within 10 cM of the MF gene loci.
[1012] 98. The method of any of the preceding paragraphs, wherein the at least one ectopic functional allele of a PV gene is located within 1 cM of the MF gene loci.
[1013] 99. The method of any of the preceding paragraphs, wherein the only exogenous sequence in the genomes is the at least one allele of a seed color gene (e.g., seed coat and/or seed endosperm gene) (or at least one functional ectopic allele of each member of a set of seed color genes).
[1014] 100. The method of any of the preceding paragraphs, wherein the only ectopic sequence in the genomes is the at least one ectopic functional allele of a PV gene.
[1015] 101. The method of any of the preceding paragraphs, wherein the plant is tetraploid and the second genome comprises loss-of-function alleles of the MF gene at the native MF gene loci and loss-of-function alleles of the PV gene at the native PV gene loci.
[1016] 102. The method of any of the preceding paragraphs, wherein the plant is hexaploid and the second and third genomes both comprise loss-of-function alleles of the MF gene at the native MF gene loci and loss-of-function alleles of the PV gene at the native PV gene loci.
[1017] 103. The method of any of the preceding paragraphs, wherein a loss-of-function allele comprises an engineered knock-out modification.
[1018] 104. The method of any of the preceding paragraphs, wherein a loss-of-function allele comprises an engineered excision of at least part of a coding or regulatory sequence.
[1019] 105. The method of any of paragraphs 103-104, wherein the loss-of-function allele is engineered using a site-specific guided nuclease.
[1020] 106. The method of paragraph 105, wherein the site-specific guided nuclease is a form of CRISPR-Cas (such as CRISPR-Cas9).
[1021] 107. The method of any of the preceding paragraphs, wherein the plant is wheat, triticale, canola/oilseed rape, indian mustard, barley, rice, oat, or rye.
[1022] 108. The method of any of the preceding paragraphs, wherein the plant is wheat.
[1023] 109. The method of paragraph 108, wherein the at least one allele of a seed color gene (e.g., seed coat and/or seed endosperm gene) (or at least one functional ectopic allele of each member of a set of seed color genes) comprises a sequence from T. aestivum, T durum, T. monococcum or another Triticum aestivum-crossable species.
[1024] 110. The method of any of the preceding paragraphs, wherein the plant is hexaploid wheat or tetraploid wheat, Triticum aestivum, or Triticum durum.
[1025] 111. The method of any of the preceding paragraphs, wherein the at least one functional ectopic allele of a MF gene and at least one functional ectopic allele of a seed color gene (e.g., seed coat and/or seed endosperm gene) (or at least one functional ectopic allele of each member of a set of seed color genes) comprises the sequence of SEQ ID NO: 173 or a sequence with at least 80%, 85%, 90%, or 95% sequence identity thereto; and/or wherein the at least one functional ectopic allele of a PV gene comprises the sequence of SEQ ID NO: 172 or 218 or a sequence with at least 80%, 85%, 90%, or 95% sequence identity thereto.
[1026] 112. The method of any of the preceding paragraphs, wherein the guide RNA sequences and/or multi-guide constructs comprise one or more of SEQ ID NOs: 22-29, 131-154, 156, 210-213, 217, or 235-238.
[1027] 113. A method of providing a male sterile plant seed, the method comprising selecting, from seed produced by selfing a plant of any one of paragraphs 1-49, seed not displaying a phenotype provided by the seed endosperm gene.
[1028] 114. A method of providing male sterile plant seed, the method comprising selfing a plant of any one of paragraphs 1-49, whereby the resulting seed not displaying a phenotype provided by the seed endosperm gene is the male sterile plant seed.
[1029] 115. A method of providing a F1 hybrid seed for crop production, the method comprising collecting the seed produced by a male-sterile plant pollinated by a male-fertile plant, wherein the male-sterile plant is
   [1030] a) a plant grown from male sterile plant seed obtained by the method of paragraph 105 or 106; and/or
   [1031] b) comprises:
      [1032] i) loss-of-function alleles of an endogenous MF gene at each of the native MF gene loci;
      [1033] ii) loss-of-function alleles of an endogenous PV gene at each of the native PV gene loci; and
      [1034] iii) two ectopic alleles of the PV gene at a target locus.
[1035] 116. A method of providing a F1 hybrid seed for crop production, the method comprising crossing a a male-sterile plant with a male-fertile plant, wherein the male-sterile plant is
[1036] a) a plant grown from male sterile plant seed obtained by the method of paragraph 113 or 114; and/or
[1037] b) comprises:
   [1038] i) loss-of-function alleles of an endogenous MF gene at each of the native MF gene loci;
   [1039] ii) loss-of-function alleles of an endogenous PV gene at each of the native PV gene loci; and
   [1040] iii) two ectopic alleles of the PV gene at a target locus.
[1041] 117. A method of providing a F1 hybrid seed for crop production, the method comprising planting a male-sterile plant within pollination range of a male-fertile plant, wherein the male-sterile plant is
   [1042] a) a plant grown from male sterile plant seed obtained by the method of paragraph 113 or 114; and/or
   [1043] b) comprises:
      [1044] i) loss-of-function alleles of an endogenous MF gene at each of the native MF gene loci;
      [1045] ii) loss-of-function alleles of an endogenous PV gene at each of the native PV gene loci; and
      [1046] iii) two ectopic alleles of the PV gene at a target locus; and whereby the male-fertile plant pollinates the male-sterile plant and F1 hybrid seed is produced.
[1047] 118. The method of paragraph 113-117, wherein the pollination range is 200 metres.
[1048] 119. The method of any of paragraphs 113-118, wherein the male-sterile plant and male fertile plant are different lines.
[1049] 120. A method of producing a plant crop, the method comprising:
   [1050] a) planting and/or harvesting a plant or portion thereof, wherein the plant:
      [1051] i) is plant grown from F1 hybrid seed obtained by the method of any of paragraphs 115-119; and/or
      [1052] ii) comprises:
         [1053] 1) in each genome of the plant, at a native MF gene locus, one functional endogenous allele of the endogenous MF gene and one loss-of-function allele of the endogenous MF gene;
         [1054] 2) in each genome of the plant, at a native PV gene locus, one functional endogenous allele of the endogenous PV gene and one loss-of-function allele of the endogenous PV gene;
         [1055] 3) one ectopic allele of the PV gene at a target locus.

[1056] In some embodiments, the present technology may be defined in any of the following numbered paragraphs:
[1057] 1. A male-fertile maintainer plant for a male-sterile polyploid plant comprising: a first genome comprising:
   [1058] on a first chromosome of a pair of homologous chromosomes, at a single target locus, at least one functional ectopic allele of a MF gene and at least one functional ectopic allele of a seed color gene (e.g., seed coat and/or seed endosperm gene) (or at least one functional ectopic allele of each member of a set of seed color genes);
   [1059] on a second chromosome of the pair of homologous chromosomes, at the target locus corresponding to the target locus of the first chromosome of the pair of homologous chromosomes, at least one functional ectopic allele of a PV gene;
   [1060] loss-of-function alleles of the endogenous MF genes at the native MF gene loci and loss-of-function alleles of the endogenous PV genes at the native PV gene loci.
[1061] 2. The male-fertile maintainer plant of paragraph 1, comprising at least one further genome, each of the further genomes comprising loss-of-function alleles of the endogenous MF genes at the native MF gene loci and loss-of-function alleles of the PV gene at the native PV gene loci.
[1062] 3. The male-fertile maintainer plant of paragraph 1 or 2, wherein the target locus is the native MF gene locus.
[1063] 4. The male-fertile maintainer plant of paragraph 1 or 2, wherein the target locus is the native PV gene locus.
[1064] 5. The male-fertile maintainer plant of paragraph 1 or 2, wherein the target locus is not the native MF gene locus or the native PV gene locus.
[1065] 6. The male-fertile maintainer plant of any one of the preceding paragraphs, wherein the ectopic allele of the MF gene and/or the ectopic allele of the PV gene is a nuclease-null allele.
[1066] 7. The male-fertile maintainer plant of any one of the preceding paragraphs, wherein the ectopic allele of the MF gene and/or the ectopic allele of the PV gene is a CRISPR-null allele.
[1067] 8. A male-fertile maintainer plant for a male-sterile polyploid plant comprising:
   [1068] a first genome comprising:
      [1069] on a first chromosome of a pair of homologous chromosomes, at least one functional allele of a MF gene at the MF gene locus and at least one allele of a seed color gene (e.g., seed coat and/or seed endosperm gene) (or at least one functional ectopic allele of each member of a set of seed color genes);
      [1070] on a second chromosome of the pair of homologous chromosomes, a loss-of-function allele of the MF gene at the MF gene locus and at least one ectopic functional allele of a PV gene;
      [1071] and loss-of-function alleles of the PV gene at the native PV gene loci; and
   [1072] at least one further genome, each of the further genomes comprising loss-of-function alleles of the MF gene at the native MF gene loci and loss-of-function alleles of the PV gene at the native PV gene loci.
[1073] 9. The plant of any one of the preceding paragraphs, wherein the at least one functional allele of a MF gene is the endogenous wild-type functional allele of the MF gene.
[1074] 10. The plant of any one of the preceding paragraphs, wherein the at least one functional allele of a MF gene is an ectopic copy of the MF gene.
[1075] 11. The plant of paragraph 10, wherein the at least one functional allele of a MF gene and the at least one allele of a seed color gene (e.g., seed coat and/or seed endosperm gene) (or at least one functional ectopic allele of each member of a set of seed color genes) are part of single construct.
[1076] 12. The plant of any one of the preceding paragraphs, wherein an ectopic allele or ectopic copy of a gene is a nuclease-null or CRISPR-null allele.
[1077] 13. The plant of any one of the preceding paragraphs, wherein the MF gene displays the same type of activity and shares at least 80%, at least 85%, at least 90%, at least 95%, or greater sequence identity with one or more of the genes of Table 1.
[1078] 14. The plant of paragraph 13, wherein the MF gene is selected from Table 1.
[1079] 15. The plant of any one of the preceding paragraphs, wherein the MF gene displays the same type of activity and shares at least 80%, at least 85%, at least 90%, at least 95%, or greater sequence identity with Mfw2.
[1080] 16. The plant of any one of the preceding paragraphs, wherein the MF gene is Mfw2.
[1081] 17. The plant of any one of the preceding paragraphs, wherein the MF gene displays the same type of activity and shares at least 80%, at least 85%, at least 90%, at least 95%, or greater sequence identity with Ms1.
[1082] 18. The plant of any one of the preceding paragraphs, wherein the MF gene is Ms1.
[1083] 19. The plant of any one of the preceding paragraphs, wherein the PV gene displays the same type of activity and shares at least 80%, at least 85%, at least 90%, at least 95%, or greater sequence identity with one or more of the genes of Table 2.
[1084] 20. The plant of paragraph 17, wherein the PV gene is selected from Table 2.
[1085] 21. The plant of any one of the preceding paragraphs, wherein the PV gene displays the same type of activity and shares at least 80%, at least 85%, at least 90%, at least 95%, or greater sequence identity with PV1 or PV2.
[1086] 22. The plant of any one of the preceding paragraphs, wherein the PV gene is PV1 or PV2.
[1087] 23. The plant of any one of the preceding paragraphs, wherein the PV gene displays the same type of activity and shares at least 80%, at least 85%, at least 90%, at least 95%, or greater sequence identity with PV3.
[1088] 24. The plant of any one of the preceding paragraphs, wherein the PV gene is PV3.
[1089] 25. The plant of any one of the preceding paragraphs, wherein the MF gene displays the same type of activity and shares at least 80%, at least 85%, at least 90%, at least 95%, or greater sequence identity with Mfw2 and the PV gene displays the same type of activity and shares at least 80%, at least 85%, at least 90%, at least 95%, or greater sequence identity with PV1.
[1090] 26. The plant of any one of the preceding paragraphs, wherein the MF gene is Mfw2 and the PV gene is PV1.
[1091] 27. The plant of any one of the preceding paragraphs, wherein the MF gene displays the same type of activity and shares at least 80%, at least 85%, at least 90%, at least 95%, or greater sequence identity with Ms1 and the PV gene displays the same type of activity and shares at least 80%, at least 85%, at least 90%, at least 95%, or greater sequence identity with PV1.
[1092] 28. The plant of any one of the preceding paragraphs, wherein the MF gene is Ms1 and the PV gene is PV1.
[1093] 29. The plant of any one of the preceding paragraphs, wherein the MF gene displays the same type of activity and shares at least 80%, at least 85%, at least 90%, at least 95%, or greater sequence identity with Mfw2 and the PV gene displays the same type of activity and shares at least 80%, at least 85%, at least 90%, at least 95%, or greater sequence identity with PV3.
[1094] 30. The plant of any one of the preceding paragraphs, wherein the MF gene is Mfw2 and the PV gene is PV3.
[1095] 31. The plant of any one of the preceding paragraphs, wherein the at least one allele of a seed color gene (e.g., seed coat and/or seed endosperm gene) (or at least one functional ectopic allele of each member of a set of seed color genes) is exogenous.
[1096] 32. The plant of any one of the preceding paragraphs, wherein the at least one allele of a seed color gene (e.g., seed coat and/or seed endosperm gene) is blue aleurone (BA).
[1097] 33. The plant of any one of the preceding paragraphs, wherein the at least one allele of a seed color gene (e.g., seed coat and/or seed endosperm gene) (or at least one functional ectopic allele of each member of a set of seed color genes) comprises sequences obtained from a species within the same genus as the plant.
[1098] 34. The plant of any one of the preceding paragraphs, wherein the at least one allele of a seed color gene (e.g., seed coat and/or seed endosperm gene) (or at least one functional ectopic allele of each member of a set of seed color genes) is located within 10 cM of the MF gene loci.
[1099] 35. The plant of any one of the preceding paragraphs, wherein the at least one allele of a seed color gene (e.g., seed coat and/or seed endosperm gene) (or at least one functional ectopic allele of each member of a set of seed color genes) is located within 1 cM of the MF gene loci.
[1100] 36. The plant of any one of the preceding paragraphs, wherein the at least one ectopic functional allele of a PV gene is located within 10 cM of the MF gene loci.
[1101] 37. The plant of any one of the preceding paragraphs, wherein the at least one ectopic functional allele of a PV gene is located within 1 cM of the MF gene loci.
[1102] 38. The plant of any one of the preceding paragraphs, wherein the only exogenous sequence in the genomes is the at least one allele of a seed color gene (e.g., seed coat and/or seed endosperm gene) (or at least one functional ectopic allele of each member of a set of seed color genes).
[1103] 39. The plant of any one of the preceding paragraphs, wherein the only ectopic sequence in the genomes is the at least one ectopic functional allele of a PV gene.
[1104] 40. The plant of any one of the preceding paragraphs, wherein the plant is tetraploid and the second genome comprises loss-of-function alleles of the MF gene at the native MF gene loci and loss-of-function alleles of the PV gene at the native PV gene loci.
[1105] 41. The plant of any one of the preceding paragraphs, wherein the plant is hexaploid and the second and third genomes both comprise loss-of-function alleles of the MF gene at the native MF gene loci and loss-of-function alleles of the PV gene at the native PV gene loci.
[1106] 42. The plant of any one of the preceding paragraphs, wherein a loss-of-function allele comprises an engineered knock-out modification.
[1107] 43. The plant of any one of the preceding paragraphs, wherein a loss-of-function allele comprises an engineered excision of at least part of a coding or regulatory sequence.
[1108] 44. The plant of any one of paragraphs 42-43, wherein the loss-of-function allele is engineered using a site-specific guided nuclease.
[1109] 45. The plant of paragraph 44, wherein the site-specific guided nuclease is a form of CRISPR-Cas (such as CRISPR-Cas9).
[1110] 46. The plant of any one of the preceding paragraphs, wherein the plant is wheat, triticale, canola/oilseed rape, indian mustard, barley, rice, oat, or rye.
[1111] 47. The plant of any one of the preceding paragraphs, wherein the plant is wheat.
[1112] 48. The plant of paragraph 41, wherein the at least one allele of a seed color gene (e.g., seed coat and/or seed endosperm gene) (or at least one functional ectopic allele of each member of a set of seed color genes) comprises a sequence from T. aestivum, T durum, T. monococcum or another Triticum aestivum-crossable species.
[1113] 49. The plant of any one of the preceding paragraphs, wherein the plant is hexaploid wheat or tetraploid wheat, Triticum aestivum, or Triticum durum.
[1114] 50. A method of preparing a male-fertile maintainer plant for a male-sterile polyploid plant, the method comprising engineering a plant to comprise:
   [1115] in a first genome:
      [1116] on a first chromosome of a pair of homologous chromosomes, at a single target locus, at least one functional ectopic allele of a MF gene and at least one functional ectopic allele of a seed color gene (e.g., seed coat and/or seed endosperm gene) (or at least one functional ectopic allele of each member of a set of seed color genes);
      [1117] on a second chromosome of the pair of homologous chromosomes, at the target locus corresponding to the target locus of the first chromosome of the pair of homologous chromosomes, at least one functional ectopic allele of a PV gene; and
      [1118] loss-of-function alleles of the endogenous MF genes at the native MF gene loci and loss-of-function alleles of the endogenous PV genes at the native PV gene loci.
[1119] 51. A method of preparing a male-fertile maintainer plant for a male-sterile polyploid plant, the method comprising, simultaneously or sequentially:
   [1120] inserting, on a first chromosome of a pair of homologous chromosomes in a first genome, at a single target locus, a construct comprising at least one functional ectopic allele of a MF gene and at least one functional ectopic allele of a seed color gene (e.g., seed coat and/or seed endosperm gene) (or at least one functional ectopic allele of each member of a set of seed color genes), optionally wherein the inserting comprises nuclease cleavage of the target locus (e.g., zinc-finger nuclease or CRISPR nuclease cleavage) and recombination or end-joining of the construct;
   [1121] inserting, on a second chromosome of the pair of homologous chromosomes in the first genome, at the target locus corresponding to the target locus of the first chromosome of the pair of homologous chromosomes, a construct comprising at least one functional ectopic allele of a PV gene, optionally wherein the inserting comprises nuclease cleavage of the target locus (e.g., zinc-finger nuclease or CRISPR nuclease cleavage) and/or recombination or end-joining of the construct; and
   [1122] mutating the the endogenous MF genes at the native MF gene loci and the endogenous PV genes at the native PV gene loci to create loss-of-function alleles, optionally wherein the loss-of-function alleles are caused by contacting the genome with a site-specific guided nuclease (e.g., CRISPR) and one or more guide RNA sequences or multi-guide constructs.
[1123] 52. A method of preparing a male-fertile maintainer plant for a male-sterile polyploid plant, the method comprising:
   [1124] i) inserting, on a first chromosome of a pair of homologous chromosomes in a first genome, at a single target locus, a cassette comprising in 5′ to 3′ or 3′ to 5′ order:
      [1125] a first recognition site for a first recombinase;
      [1126] at least one functional ectopic nuclease null allele of a MF gene and at least one functional ectopic allele of a seed color gene (e.g., seed coat and/or seed endosperm gene) (or at least one functional ectopic allele of each member of a set of seed color genes) in either relative order;
      [1127] a first recognition site for a second recombinase;
      [1128] a selection gene;
      [1129] a second recognition site for the first recombinase;
      [1130] at least one functional ectopic nuclease-null allele of a PV gene;
      [1131] a second recognition site for the second recombinase;
   thereby providing a full-cassette insertion plant;
   [1132] ii) contacting a first progeny of the full-cassette insertion plant, or a cell thereof, with the first recombinase,
   thereby excising:
      [1133] one recognition site for the first recombinase, the at least one functional ectopic nuclease null allele of a MF gene and at least one functional ectopic allele of a seed color gene (e.g., seed coat and/or seed endosperm gene) (or at least one functional ectopic allele of each member of a set of seed color genes), the first recognition site for the second recombinase, and the selection gene from the genome of the first progeny and
   thereby providing an excised first progeny comprising:
      [1134] one recognition site for the first recombinase, the at least one functional ectopic nuclease-null allele of a PV gene, and the second recognition site for the second recombinase portions of the construct;
   [1135] iii) contacting a second progeny of the full-cassette insertion plant, or a cell thereof, with the second recombinase,
   thereby excising:
      [1136] one recognition site for the second recombinase, the selection gene, the second recognition site for the first recombinase and at least one functional ectopic nuclease-null allele of a PV gene, and
   thereby providing an excised second progeny comprising:
      [1137] one recognition site for the second recombinase, the first recognition site for the first recombinase, and the at least one functional ectopic nuclease null allele of a MF gene and at least one functional ectopic allele of a seed color gene (e.g., seed coat and/or seed endosperm gene) (or at least one functional ectopic allele of each member of a set of seed color genes) portions of the construct;
   [1138] iv) crossing the excised first progeny provided in step ii) and the excised second progeny provided in step iii), thereby providing a third progeny comprising, in a first genome,
      [1139] on a first chromosome of a pair of homologous chromosomes, at a single target locus, the at least one functional ectopic nuclease-null allele of a MF gene and the at least one functional ectopic allele of a seed color gene (e.g., seed coat and/or seed endosperm gene) (or at least one functional ectopic allele of each member of a set of seed color genes);
      [1140] on a second chromosome of the pair of homologous chromosomes, at the target locus corresponding to the target locus of the first chromosome of the pair of homologous chromosomes, the at least one functional ectopic nuclease-null allele of a PV gene; and
   [1141] v) mutating the the endogenous MF genes at the native MF gene loci and the endogenous PV genes at the native PV gene loci to create loss-of-function alleles, optionally wherein the loss-of-function alleles are caused by contacting the genome with a site-specific guided nuclease (e.g., CRISPR) and one or more guide RNA sequences or multi-guide constructs, thereby providing the male-fertile maintainer plant.
[1142] 53. The method of paragraph 52, wherein one of first recombinase and second recombinase is Cre and the other recombinase is Flp.
[1143] 54. The method of any one of paragraphs 52-53, wherein the construct is a T-DNA construct.
[1144] 55. The method of any one of paragraphs 52-54, wherein one or more of the steps further comprise selection of the provided plants or cells, optionally wherein the selection is PCR selection.
[1145] 56. The method of any one of paragraphs 52-55, wherein the plant further comprises at least one further genome, and the method further comprises engineering loss-of-function alleles of the endogenous MF genes at the native MF gene loci and loss-of-function alleles of the PV gene at the native PV gene loci in each of the at least one further genomes.
[1146] 57. The method of any one of paragraphs 52-56, wherein the target locus is the native MF gene locus.
[1147] 58. The method of any one of paragraphs 52-57, wherein the target locus is the native PV gene locus.
[1148] 59. The method of any one of paragraphs 52-56, wherein the target locus is not the native MF gene locus or the native PV gene locus.
[1149] 60. A method of preparing a male-fertile maintainer plant for a male-sterile polyploid plant, the method comprising:
   [1150] i) contacting a cell comprising a PV locus in a first chromosome and a second chromosome of a pair of homologous chromosomes in a first genome, with:
      [1151] 1) a site-specific guided nuclease (e.g., CRISPR);
      [1152] 2) one or more guide RNA sequences or multi-guide constructs specific to one or more sequences at the PV locus; and
      [1153] 3) an targeting insertion cassette comprising in 5′ to 3′ or 3′ to 5′ order: a first recognition site for a first recombinase and a second recognition site for the first recombinase;
   thereby providing a targeting insertion plant;
   [1154] ii) contacting the targeting insertion plant, or first progeny of the targeting insertion plant, or a cell thereof with the first recombinase and a cassette comprising in 5′ to 3′ or 3′ to 5′ order:
      [1155] 4) a first recombination site for the first recombinase;
      [1156] 5) at least one functional ectopic nuclease null allele of a MF gene and at least one functional ectopic allele of a seed color gene (e.g., seed coat and/or seed endosperm gene) (or at least one functional ectopic allele of each member of a set of seed color genes) in either relative order; and
      [1157] 6) a second recombination site for the first recombinase;
   thereby providing a cassette insertion plant;
   [1158] iii) selecting a cassette insertion plant comprising a cassette insertion at one allele of the PV locus, or crossing a cassette insertion plant comprising a cassette insertion at both alleles of the PV locus with a plant with a functional PV allele at the PV locus,
   thereby providing a cassette insertion plant with a cassette insertion at one PV allele in the first genome and a functional PV allele at the second PV allele in the first genome,
   [1159] iv) contacting the cassette insertion plant selected in iii), or a first progeny or cell thereof, with:
      [1160] 1) a site-specific guided nuclease (e.g., CRISPR);
      [1161] 2) one or more guide RNA sequences or multi-guide constructs flanking the insertion sites, thereby excising the inserted recombination sites;
      [1162] 3) one or more guide RNA sequences or multi-guide constructs specific to the functional endogenous MF genes and/or flanking the functional endogenous MF genes, thereby mutating the functional endogenous MF genes at the functional native MF gene loci to create loss-of-function alleles;
thereby providing the male-fertile maintainer plant.
[1163] 61. The method of paragraph 60, wherein the contacting of step i) comprises biolistic delivery or integration.
[1164] 62. The method of any of paragraphs 60-61, wherein the contacting of step ii) comprises transforming the plant, progeny, or cell thereof with one or more T-DNAs comprising the recombinase and cassette.
[1165] 63. The method of paragraph 62, wherein the method further comprises a step v) of segregating remaining T-DNA out of the plant or plant cells.
[1166] 64. The method of any of paragraphs 60-64, wherein the MF gene is endogenously expressed only from the first genome.
[1167] 65. The method of paragraph 64, wherein the MF gene is Ms1.
[1168] 66. The method of paragraph 65, wherein the one or more sequences at the MF locus are the gRNA sequences or constructs can be or comprise one or more of the three gRNA sequences of SEQ ID NOs: 253, 254, and 267.
[1169] 67. The method of any of paragraphs 60-63, wherein the PV gene is endogenously expressed from the first genome and at least one further genome and in step iv) the plant, first progeny, or cell thereof is further contacted with one or more guide RNA sequences or multi-guide constructs specific to the endogenous PV genes and/or flanking the endogenous PV genes, thereby mutating the endogenous PV genes at the native PV gene loci to create loss-of-function alleles.
[1170] 68. The method of any one of the preceding paragraphs, wherein the ectopic allele of the MF gene and/or the ectopic allele of the PV gene is a nuclease-null allele.
[1171] 69. The method of any of the preceding paragraphs, wherein the ectopic allele of the MF gene and/or the ectopic allele of the PV gene is a CRISPR-null allele.
[1172] 70. The method of any of the preceding paragraphs, wherein the at least one functional allele of a MF gene is the endogenous wild-type functional allele of the MF gene.
[1173] 71. The method of any of the preceding paragraphs, wherein the at least one functional allele of a MF gene is an ectopic copy of the MF gene.
[1174] 72. The method of any of the preceding paragraphs, wherein the at least one functional allele of a MF gene and the at least one allele of a seed color gene (e.g., seed coat and/or seed endosperm gene) (or at least one functional ectopic allele of each member of a set of seed color genes) are part of single construct.
[1175] 73. The method of any of the preceding paragraphs, wherein an ectopic allele or ectopic copy of a gene is a nuclease-null or CRISPR-null allele.
[1176] 74. The method of any of the preceding paragraphs, wherein the MF gene displays the same type of activity and shares at least 80%, at least 85%, at least 90%, at least 95%, or greater sequence identity with one or more of the genes of Table 1.
[1177] 75. The method of paragraph 74, wherein the MF gene is selected from Table 1.
[1178] 76. The method of any of the preceding paragraphs, wherein the MF gene displays the same type of activity and shares at least 80%, at least 85%, at least 90%, at least 95%, or greater sequence identity with Mfw2.
[1179] 77. The method of any of the preceding paragraphs, wherein the MF gene is Mfw2.
[1180] 78. The method of any of the preceding paragraphs, wherein the MF gene displays the same type of activity and shares at least 80%, at least 85%, at least 90%, at least 95%, or greater sequence identity with Ms1.
[1181] 79. The method of any of the preceding paragraphs, wherein the MF gene is Ms1.
[1182] 80. The method of any one of the preceding paragraphs, wherein the PV gene displays the same type of activity and shares at least 80%, at least 85%, at least 90%, at least 95%, or greater sequence identity with one or more of the genes of Table 2.
[1183] 81. The method of paragraph 78, wherein the PV gene is selected from Table 2.
[1184] 82. The method of any of the preceding paragraphs, wherein the PV gene displays the same type of activity and shares at least 80%, at least 85%, at least 90%, at least 95%, or greater sequence identity with PV1 or PV2.
[1185] 83. The method of any of the preceding paragraphs, wherein the PV gene is PV1 or PV2.
[1186] 84. The method of any one of the preceding paragraphs, wherein the PV gene displays the same type of activity and shares at least 80%, at least 85%, at least 90%, at least 95%, or greater sequence identity with PV3.
[1187] 85. The method of any one of the preceding paragraphs, wherein the PV gene is PV3.
[1188] 86. The method of any one of the preceding paragraphs, wherein the MF gene displays the same type of activity and shares at least 80%, at least 85%, at least 90%, at least 95%, or greater sequence identity with Mfw2 and the PV gene displays the same type of activity and shares at least 80%, at least 85%, at least 90%, at least 95%, or greater sequence identity with PV1.
[1189] 87. The method of any one of the preceding paragraphs, wherein the MF gene is Mfw2 and the PV gene is PV1.
[1190] 88. The method of any one of the preceding paragraphs, wherein the MF gene displays the same type of activity and shares at least 80%, at least 85%, at least 90%, at least 95%, or greater sequence identity with Ms1 and the PV gene displays the same type of activity and shares at least 80%, at least 85%, at least 90%, at least 95%, or greater sequence identity with PV1.
[1191] 89. The method of any one of the preceding paragraphs, wherein the MF gene is Ms1 and the PV gene is PV1.
[1192] 90. The method of any one of the preceding paragraphs, wherein the MF gene displays the same type of activity and shares at least 80%, at least 85%, at least 90%, at least 95%, or greater sequence identity with Mfw2 and the PV gene displays the same type of activity and shares at least 80%, at least 85%, at least 90%, at least 95%, or greater sequence identity with PV3.
[1193] 91. The method of any one of the preceding paragraphs, wherein the MF gene is Mfw2 and the PV gene is PV3.
[1194] 92. The method of any of the preceding paragraphs, wherein the at least one allele of a seed color gene (e.g., seed coat and/or seed endosperm gene) (or at least one functional ectopic allele of each member of a set of seed color genes) is exogenous.
[1195] 93. The method of any of the preceding paragraphs, wherein the at least one allele of a seed color gene (e.g., seed coat and/or seed endosperm gene) is blue aleurone (BA).
[1196] 94. The method of any of the preceding paragraphs, wherein the at least one allele of a seed color gene (e.g., seed coat and/or seed endosperm gene) (or at least one functional ectopic allele of each member of a set of seed color genes) comprises sequences obtained from a species within the same genus as the plant.
[1197] 95. The method of any of the preceding paragraphs, wherein the at least one allele of a seed color gene (e.g., seed coat and/or seed endosperm gene) (or at least one functional ectopic allele of each member of a set of seed color genes) is located within 10 cM of the MF gene loci.
[1198] 96. The method of any of the preceding paragraphs, wherein the at least one allele of a seed color gene (e.g., seed coat and/or seed endosperm gene) (or at least one functional ectopic allele of each member of a set of seed color genes) is located within 1 cM of the MF gene loci.
[1199] 97. The method of any of the preceding paragraphs, wherein the at least one ectopic functional allele of a PV gene is located within 10 cM of the MF gene loci.
[1200] 98. The method of any of the preceding paragraphs, wherein the at least one ectopic functional allele of a PV gene is located within 1 cM of the MF gene loci.
[1201] 99. The method of any of the preceding paragraphs, wherein the only exogenous sequence in the genomes is the at least one allele of a seed color gene (e.g., seed coat and/or seed endosperm gene) (or at least one functional ectopic allele of each member of a set of seed color genes).
[1202] 100. The method of any of the preceding paragraphs, wherein the only ectopic sequence in the genomes is the at least one ectopic functional allele of a PV gene.
[1203] 101. The method of any of the preceding paragraphs, wherein the plant is tetraploid and the second genome comprises loss-of-function alleles of the MF gene at the native MF gene loci and loss-of-function alleles of the PV gene at the native PV gene loci.
[1204] 102. The method of any of the preceding paragraphs, wherein the plant is hexaploid and the second and third genomes both comprise loss-of-function alleles of the MF gene at the native MF gene loci and loss-of-function alleles of the PV gene at the native PV gene loci.
[1205] 103. The method of any of the preceding paragraphs, wherein a loss-of-function allele comprises an engineered knock-out modification.
[1206] 104. The method of any of the preceding paragraphs, wherein a loss-of-function allele comprises an engineered excision of at least part of a coding or regulatory sequence.
[1207] 105. The method of any of paragraphs 103-104, wherein the loss-of-function allele is engineered using a site-specific guided nuclease.
[1208] 106. The method of paragraph 105, wherein the site-specific guided nuclease is a form of CRISPR-Cas (such as CRISPR-Cas9).
[1209] 107. The method of any of the preceding paragraphs, wherein the plant is wheat, triticale, canola/oilseed rape, indian mustard, barley, rice, oat, or rye.
[1210] 108. The method of any of the preceding paragraphs, wherein the plant is wheat.
[1211] 109. The method of paragraph 108, wherein the at least one allele of a seed color gene (e.g., seed coat and/or seed endosperm gene) (or at least one functional ectopic allele of each member of a set of seed color genes) comprises a sequence from T. aestivum, T durum, T. monococcum or another Triticum aestivum-crossable species.
[1212] 110. The method of any of the preceding paragraphs, wherein the plant is hexaploid wheat or tetraploid wheat, Triticum aestivum, or Triticum durum.
[1213] 111. The method of any of the preceding paragraphs, wherein the at least one functional ectopic allele of a MF gene and at least one functional ectopic allele of a seed color gene (e.g., seed coat and/or seed endosperm gene) (or at least one functional ectopic allele of each member of a set of seed color genes) comprises the sequence of SEQ ID NO: 173 or a sequence with at least 80%, 85%, 90%, or 95% sequence identity thereto; and/or wherein the at least one functional ectopic allele of a PV gene comprises or encodes the sequence of SEQ ID NO: 172 or 258 or a sequence with at least 80%, 85%, 90%, or 95% sequence identity thereto.
[1214] 112. The method of any of the preceding paragraphs, wherein the guide RNA sequences and/or multi-guide constructs comprise one or more of SEQ ID NOs: 22-29, 131-154, 156, 210-213, 217, 235-238, 253-255, and 266-267.
[1215] 113. A method of providing a male sterile plant seed, the method comprising selecting, from seed produced by selfing a plant of any one of paragraphs 1-49, seed not displaying a phenotype provided by the seed endosperm gene.
[1216] 114. A method of providing male sterile plant seed, the method comprising selfing a plant of any one of paragraphs 1-49, whereby the resulting seed not displaying a phenotype provided by the seed endosperm gene is the male sterile plant seed.
[1217] 115. A method of providing a F1 hybrid seed for crop production, the method comprising collecting the seed produced by a male-sterile plant pollinated by a male-fertile plant, wherein the male-sterile plant is
   [1218] a) a plant grown from male sterile plant seed obtained by the method of paragraph 105 or 106; and/or
   [1219] b) comprises:
      [1220] i) loss-of-function alleles of an endogenous MF gene at each of the native MF gene loci;
      [1221] ii) loss-of-function alleles of an endogenous PV gene at each of the native PV gene loci; and
      [1222] iii) two ectopic alleles of the PV gene at a target locus.
[1223] 116. A method of providing a F1 hybrid seed for crop production, the method comprising crossing a a male-sterile plant with a male-fertile plant, wherein the male-sterile plant is
   [1224] a) a plant grown from male sterile plant seed obtained by the method of paragraph 113 or 114; and/or
   [1225] b) comprises:
      [1226] i) loss-of-function alleles of an endogenous MF gene at each of the native MF gene loci;
      [1227] ii) loss-of-function alleles of an endogenous PV gene at each of the native PV gene loci; and
      [1228] iii) two ectopic alleles of the PV gene at a target locus.
[1229] 117. A method of providing a F1 hybrid seed for crop production, the method comprising planting a male-sterile plant within pollination range of a male-fertile plant, wherein the male-sterile plant is
   [1230] a) a plant grown from male sterile plant seed obtained by the method of paragraph 113 or 114; and/or
   [1231] b) comprises:
      [1232] i) loss-of-function alleles of an endogenous MF gene at each of the native MF gene loci;
      [1233] ii) loss-of-function alleles of an endogenous PV gene at each of the native PV gene loci; and
      [1234] iii) two ectopic alleles of the PV gene at a target locus; and
   [1235] whereby the male-fertile plant pollinates the male-sterile plant and F1 hybrid seed is produced.
[1236] 118. The method of paragraph 113-117, wherein the pollination range is 200 metres.
[1237] 119. The method of any of paragraphs 113-118, wherein the male-sterile plant and male fertile plant are different lines.
[1238] 120. A method of producing a plant crop, the method comprising:
   [1239] a) planting and/or harvesting a plant or portion thereof, wherein the plant:
      [1240] i) is plant grown from F1 hybrid seed obtained by the method of any of paragraphs 115-119; and/or
      [1241] ii) comprises:
         [1242] 1) in each genome of the plant, at a native MF gene locus, one functional endogenous allele of the endogenous MF gene and one loss-of-function allele of the endogenous MF gene;
         [1243] 2) in each genome of the plant, at a native PV gene locus, one functional endogenous allele of the endogenous PV gene and one loss-of-function allele of the endogenous PV gene;
         [1244] 3) one ectopic allele of the PV gene at a target locus.

[1245] The technology described herein is further illustrated by the following examples which in no way should be construed as being further limiting.

### EXAMPLES

### Example 1

[1246] In an exemplary embodiment, provided herein is a cis-genic maintainer based on a pre-meiosis-expressed wheat male-fertility gene, MF, (to restore male-fertility to a male-sterile plant where other copies of that gene have been knocked-out), and an allelic knocked-in Pollen Vital (PV) gene (to cause pollen grain viability where other PV copies have been knocked out) and a coloured-grain (e.g., a blue aleurone layer grain (BA) gene (to permit positive selection, in the maintainer-line seed production, of the 50% progeny which have inherited the necessary MF and pv genes in the maintainer-line's female gametes/ovules). In some embodiments of any of the aspects, the MF is Mfw2 and the PV gene is PV1, which is expressed at pollen germination. All endogenous copies of these genes are knocked-out/mutated, with the exception of a single endogenous copy of MF which is retained, linked with the coloured-grain gene.

[1247] An exemplary embodiment of this system is depicted in FIGS. 1-7. FIG. 1 depicts a first step in producing a maintainer line. A wild-type elite wheat line is selected for transformation with two genes which will be ‘knocked in’ to the identical locus extremely close to MFW so that an ‘allelic’ pair can be selected. The two genes, using cis-genes from Triticum, will be BA (or another endosperm-expressed grain colour gene) and PV (the pollen vital gene fully-expressed). After the insertions, complementary chromosomes/alleles are PCR-selected so that a new line is heterozygous BA/PV at one genome's MFW-linked locus shown as MFWBA and MFW:PV (right).

[1248] In FIG. 2, the maintainer line and cognate male sterile lines are created in parallel. The endogenous MFW and PV gene copies are mutated/knocked-out. The exception is that a genotype with just a single remaining unmutated wt MFW on the chromosome with the BA insertion is selected (see FIG. 2 top right). Thus, the fertility/sterility phenotype of the maintainer plants and their gametes will be completely dependent on the new two-gene allelic ‘constructs’: MFWBA and mfW:PV.

[1249] As shown in the top of FIG. 2, the MFW gene will not be present in the maintainer plant's viable pollen as pollen grains with the MFW gene will abort due to having no copy of the vital PV gene needed for pollen germination. Hence no transfer of male-fertility to the male-sterile. In parallel with this, a wt of the same line (with no inserted BA or PV genes) is similarly mutated to produce a genotype with MFW and PV fully knocked out. This is the male-sterile line (FIG. 2, bottom). (In this figure and subsequent ones, unexpressed genes are shown in grey and smaller; the larger/black/bold genes are the expressed ones.) By doing these experiments at the same time, the male-fertile maintainer is immediately ready to pollinate and maintain the male-sterile.

[1250] FIGS. 3-4 depict how the maintainer line is maintained. During meiosis (e.g., during the later phases of meiosis and/or after meiosis), pollen grains reciting the MFW:BA chromosome will not be viable, as they lack a functional PV gene. Therefore, the only viable grains produced have a mfw:PV genotype. When these pollen grains self-fertilize the ovules made by the maintainer line, they can fertilize one of two ovule genotypes. As shown, the two genotypes comprise either mfw:PV or MFW:BA. As depicted in FIG. 4, the resulting seed will be either 1) male-sterile and uncolored, or 2) male-fertile, colored, with the original maintainer line genotype. Thus, sorting the seeds by color will provide a pure population of the maintainer line seeds.

[1251] FIGS. 5-6 demonstrate how the maintainer line is used to maintainer the male-sterile plants. The maintainer line is used to fertilize a mfw×3, pv×3 initial male-sterile plant, providing male-sterile progeny with the indicated genotype. As depicted in FIG. 5, no viable MFW gene is transferred to the male-sterile as in top left pollen grain as contains no PV gene to give its pollen viability; the PV gene in the other pollen grain is irrelevant as its potentially viable pollen is never produced by the pre-meiosis male-sterility of a full set of knocked out MFWs—mfw×3. The progeny resulting from the cross shown in FIG. 5 can be the male-sterile line or further backcrossed with the maintainer to produce a final male-sterile line. FIG. 6 depicts how the male-sterile line is then propagated by crossing with the maintainer line. Male-sterility is maintained, in spite of the increased presence of the PV gene from the maintainer line, due to the complete knockout of all the pre-meiosis MFW genes
[1252] that is, the male-sterile plant and the progeny of a cross with the maintainer line are mfw/mfw in each of the three genomes.

[1253] FIG. 7 depicts how the male-sterile plants are used for F1 seed production. It is contemplated that during the depicted crossing event, the pollen parent will be physically mixed with the male-sterile for maximum field pollination, seed yield reliability, and least cost. The pollen parent can be any male-fertile genotype or line, e.g., an elite breeding line.

[1254] The cross provides male-fertile F1 progeny suitable for use as a wheat crop plant. The flowers of all these F1 progeny will be pre-meiosis-male-fertile as all have a copy of MFW from the wild-type parent. 1/16* or 6.25% of pollen grains will have no PV allele so that proportion of pollen grains will be non-viable. With the huge ‘excess’ of pollen production in a wheat flower, having ˜6% non viable/non-germinating pollen grains will not be a problem for crop production. The 94% which are viable due to the presence of a PV allele will be ample for fertilization.

[1255] *Each pollen grain needs only one PV allele to be viable at the pollen germination stage. Each normal PV locus is heterozygous in the parent so, in the haploid pollen grain genome, there is a ½ probability of having thepv allele in each genome. So ⅛ have no normal-locus PV allele. Then there is a ½ chance of these also having a PV allele from the MFW-linked locus, so only 1/16 pollen grains have no PV allele.

[1256] Notably, as is easily discerned from FIGS. 7 and 8, the plants involved directly in F1 seed production and crop growth do not contain exogenous genetic material, only loss-of-function alleles and an ectopic copy of PV gene, the sequence of which endogenous to the plant with only the location making the allele ectopic. That is, the plants involved directly in F1 seed production and crop growth are not transgenic.

### Example 2

[1257] The maintainer/male-sterile characteristics/genetic elements described herein can be introgressed into a new elite line by ‘conventional’ breeding. One approach to such a procedure is provided herein and illustrated in FIGS. 8-10. First, an elite wildtype (wt) line is crossed with a maintainer (of male-sterility) plant as described herein (FIG. 8). Seed harvested from the cross (ex maintainer) will be a 50% mix of the two genotypes depicted in FIG. 8. This is colour-sorted, separating the 50% with darker-coloured (BA) grains (and MFW male-fertility), (FIG. 8, bottom right), from the non-coloured plants (no BA), (FIG. 8, bottom left).

[1258] These two populations are planted, allowed to self-fertizile, and in the ensuing generation, individuals which are mfw/mfw×2 and mfw:PV/mfw:PV and pv/pv×3 (FIG. 9 left, providing male-sterile individuals) and mfW/mfw×2 and MFW:BA/MFW:BA and PV/PVx3 (FIG. 9 right) are selected by PCR analysis. These individuals are also selected for having an overall phenotype which is closest to the WT elite parent. These two selected individual plants or populations are then crossed.

[1259] The plants from this cross are grown (FIG. 10, top left) and, from their progeny, PCR analysis is used to select those plants with a mfW/mfw×2+mfwv:PV/MFW:BA+pv/pv×3 genotype (no wt PV allele) and maximum WT elite line genotype (FIG. 10, top center). These plants are allowed to self-fertilize. Harvested seed will be a 50% mix of the two genotypes indicated at the bottom of FIG. 10. This seed is colour-sorted, selecting the 50% with darker-coloured (BA) grains and so MFW male-fertility, (FIG. 10, bottom right), to become the new maintainer line and separately, the non-coloured seeds, (FIG. 10, bottom left), which become the new male-sterile line. The seed/plants can be subject to standard selection in recurrent pollinator/maintainer for a further five generations to achieve introgression in the elite line.

### Example 3

[1260] This example presents the production and use of maintainer (of male-sterility) lines comprising nuclease-null alleles. Merely for illustrative purposes, this example utilizes wheat as the plant and CRISPR as the site-specific guided nuclease, but other plants and nucleases described herein can be used in alternative embodiments.

### Making the Maintainer

[1261] Step 1: A wild-type elite wheat line is selected for conversion/transformation to become/generate both a male-sterile and its male-fertile ‘maintainer’. Two endogenous genes vital for wheat reproduction that occur naturally in all Triticum aestivum wheat lines are at the heart of this system: MFW for initial, pre-meiosis, initiation of pollen and PV for pollen development, germination, and growth on the stigma. Both genes are found as single copies on each of wheat's three genomes; and just one wild-type copy is sufficient to generate the necessary fertile phenotype. These are the focus of this system and are shown here/hereon as in FIG. 11. The present male-sterility/maintainer system uses these two wheat genes (or others instead), subtly edited (or using a subtle natural variant selected from a rare line), with a rare ‘blue aleurone’ (or other endosperm-expressed trait) wheat gene, fused to MFW, as a selectable marker.

[1262] The selected wild-type elite wheat line can be transformed with two expression cassettes containing three genes which are ‘knocked in’ to one genome's MFW. The two cassettes comprise MFW (pre-meiosis-conclusion-expressed wheat male-fertility gene, e.g., expressed before the conclusion of meiosis, diploid) fused to BA for one cassette, and PV (the pollen vital gene fully-expressed) for the other.

[1263] The MFW and PV genes within the two maintainer cassettes can be designed to have synonymous edits (compared to wild-type) at the CRISPR/Cas9 knockout guide sites (or they can use a subtle natural variant selected from a rare line). This is so that they are not recognised by the CRISPR knockout guides at the later male-sterility-creating stage, and/or so that these and other traits can be selected in a fully-fertile form before native MFW or PV genes are knocked out without affecting the inserted genes (Step 2) yet their mRNA and amino acid sequences are unchanged so they code for/produce normal fertile phenotypes. (These subtly different or edited sequences are denoted MFW′ and PV′ hereafter.) The knockin site can be down-stream/3′ of the knockout site so that it is unaffected by the knockout process.

[1264] Genotypes can be selected where MFW′:BA and PV′ are introgressed into both of the homologous MFW loci. They become, in effect, a pair of ‘alleles’ at this locus. Integration of the MFW′:BA and PV′ expression cassettes at the one MFW locus results in disruption of the two endogenous gene copies at this locus (denoted MFW), as shown in FIG. 12.

[1265] Step 2(a): Creating the maintainer and male-sterile lines in coordination. At this stage, all endogenous copies of MFW and PV are now mutated/knocked-out by CRISPR/Cas9. The MFW′ and PV′ expression cassettes inserted in Step 1 will not be CRISPR-targeted/mutated due to the CRISPR editing guides not recognising/targeting the slight/synonymous DNA sequence differences or changes at the CRISPR/Cas9 guide sites of the inserted genes. The resulting maintainer line is shown in FIG. 13.

[1266] The fertility/sterility phenotype of the maintainer plants and their gametes is now dependent on the two inserted allelic ‘constructs’: MFW′:BA and mfw:PV′. As shown in FIG. 13, these plants' viable pollen will not carry the MFW gene: the 50% of the (haploid) pollen grains which carry the MFW′ gene have mutated pv genes only and so are non-viable (wild-type PV required for pollen germination). Hence no transfer of MFW male-fertility to the male-sterile.

[1267] In parallel with the above, a wild-type of the same line (with no inserted MFW′, BA or PV′ genes) can be similarly mutated to produce a genotype with MFW and PV fully knocked out. This is the male-sterile line, as shown in FIG. 13. By doing these experiments in coordination, the male-fertile maintainer will be ready to pollinate and maintain the male-sterile. Alternatively some progeny from the making of the maintainer line above may have no successful inserts and these can be the male-sterile.

[1268] Step 2(b): Creating the maintainer and male-sterile lines together once a maintainer has already been created in a program. In an established breeding programme which already has a useable maintainer line with this system, the process described in Steps 1 and 2(a) can be accelerated and simplified as follows.

[1269] A new elite line can be back-crossed onto the established maintainer plant (with significant numbers and marker-assisted selection it should be possible to achieve near isogenic lines in ˜three generations). Then, taking embryos from a few plants with the target genotype (ie must include one genome with allelic MFW′:BA/mfW/PV′) all endogenous copies of MFW and PV can be mutated/knocked-out by CRISPR/Cas9. If no appropriate heterozygote is available at this stage, then two complementary homozygotes (most plants will be homozygous by this stage) can be crossed and the F1's embryos mutated (and a null insert plant mutated for the male sterile).

[1270] Again, the inserted MFW′ and PV′ expression cassettes will not be CRISPR-targeted/mutated and express the necessary fertility proteins. Plants for the new male-sterile can be selected from embryos which have homozygous mfw/PV′/mfw PV′ and a full set of endogenous knockouts. Plants for the new maintainer can be selected from embryos with the heterozygous maintainer combination MFW′:BA/mfw/PV′ and a full set of endogenous knockouts. Thus both a new maintainer and new male-sterile can be produced from the same experiment in the same new genetic background (see FIG. 13 for resulting genetics).

[1271] Alternative Step 1: Producing a maintainer/male-sterile using a single-genome Male-Fertility gene. The selected wild-type elite wheat line can be transformed with two expression cassettes containing three genes which are ‘knocked in’ to the one genome's MFW site The two inserted cassettes comprise MFW′ (single-genome pre-meiosis-expressed wheat male-fertility gene) fused to BA for one cassette, and PV′ (the pollen vital gene fully-expressed in all genomes) for the other.

[1272] The MFW′ and PV′ genes within the two maintainer cassettes can be designed to have (or naturally have) synonymous differences/edits (compared to wild-type) at the CRISPR/Cas9 guide sites used for knockout (at sites downstream/3′ side of the knockin sites). This is so that they are not recognised by the CRISPR knockout guides at the later male-sterility-creating stage (Step 2) yet their mRNA and amino acid sequences are unchanged so they code for/produce normal fertile phenotypes.

[1273] Genotypes can be selected where MFW′:BA and PV′ are introgressed into both of the homologous MFW loci. They become, in effect, a pair of ‘alleles’ at this locus. Integration of the MFW′:BA and PV′ expression cassettes at the one MFW locus results in disruption of the two endogenous gene copies at this locus (so here denoted MFW) as shown in FIG. 12.

### Maintaining/Using the Maintainer Line and Corresponding Male-Sterile Plants

[1274] The maintainer plant can self-fertilize. The pollen and ovules produced by the maintainer are shown in FIG. 14. The far left pollen genotype is disabled at pollen germination as it has no PV′ allele. The two right hand ovule genotypes are enabled for fertilization by the pre-meiosis, heterozygote expression of the single MFW′ allele in the far right genotype (preceding heterozygote shown in FIG. 12). These pollen and ovules will fertilize and produce F1 seed according to FIG. 15, thereby maintaining the maintainer and producing male-sterile seed at the same time.

[1275] Where male-sterile production from maintainer maintenance shown in FIGS. 14-15 will be insufficient, male sterile plants can be produced or maintained as shown in FIG. 16. No viable MFW gene is transferred to the male-sterile; the PV′ gene is irrelevant as its potentially viable pollen is never produced by the pre-meiosis male-sterility of a full set of knocked out MFWs—mfv/mfw in all genomes.

[1276] Final F1 seed production can proceed as shown in FIG. 17. It is contemplated that in F1 seed production, the pollen parent will be physically mixed with the male-sterile for maximum field pollination, maximum seed yield reliability, and least cost.

### Advantages

[1277] The male-sterile and maintainer lines described above provide lowered costs of F1 hybrid seed production. With the BA/darker-grain phenotype being colour-sortable in many seed plants, savings can be made to the final cost of male sterile-line production as well as the final F1 seed-production and provide to more easily sub-contract bioprocessing the stages to the final seed-producing company/facility.
[1278] a. The darker-grain maintainer pollinator seed can be physically mixed with the ms seed (e.g., at 1:10) to field-produce the final-stage ms seed and more maintainer seed.
[1279] b. After harvest from such a crop, the 50% of the darker-grained pollinator's seed (˜5% of the total) which is male-fertile (self-maintained maintainer) can be colour-sorted out of the ms grain. With a three-chute colour-sorter tuned to discard any ‘borderline’ grain, the darker-grain part becomes recycled maintainer seed.
[1280] c. The other non-borderline 50% seed from the maintainer (similarly ˜5% of the total) is male-sterile with effectively the same genotype as the ms itself so and efficiently adds to the ms yield as part of the same process. (The difference is that, compared to the main ms, it only has one PV allele so, come the final farmer customer's field with the wt/ms F1 heterozygote, this small proportion of the total plants, ˜ 1/19, will have ⅙ less viable pollen than other plants—there is such pollen ‘surplus’, that this is not a problem.)
[1281] d. In the final F1 seed production field (FIG. 17), the wild-type pollinator could be mixed with the ms line (e.g., at 1:15 to keep below 10% in the final seed) and the seed crop harvested as this mix. All plants' flowers will be pre-meiosis-male-fertile as all have a copy of MFW from the wild-type parent. 1/16* or 6.25% of pollen grains will have no PV allele so that proportion of pollen grains will be non-viable. With the huge ‘excess’ of pollen production in a wheat flower, having ˜6% non viable/non-germinating pollen grains will be no problem. The 94% which are viable due to the presence of a PV allele will be ample.
   *Each pollen grain needs only one PV allele to be viable. Each normal PV locus is heterozygous in the parent so, in the haploid pollen grain genome, there is a ½ probability of having the pv allele in each genome. So ⅛ have no normal-locus PV allele. Then there is a ½ chance of these also having a PV allele from the MFW-linked locus, so only 1/16 pollen grains have no PV allele.

[1282] This system has exceptional advantages for integration into breeding programmes with least disruption and least loss of focus on agronomic and other traits' improvement. Crucially the two maintainer constructs can be crossed, ‘bred in’ and selected—for along with other traits selection for all other traits only ‘converting’ the selected parent to be a male-sterile/maintainer when such progress has been achieved.

[1283] With this system being based on the use of highly conserved genes associated with male-fertility, it can also be used in other cereal grain species. Highly homologous orthologues of MFW and PV are endogenous in barley, rice, and other cereals. The concept of fine editing of the fertility gene inserts to avoid them being targeted at knockout (for male-sterility) while maintaining the identical aa sequences and proteins for full expression from the new inserts means this system is readily applicable to diploid cereals as well as hexaploid wheat.

[1284] For the first time, this offers the opportunity for a range of cereal crops to have a common hybrid system across them all with consequent advantages for costs, efficiency and ease of management.

[1285] Creating new maintainer and male-sterile plants. The maintainer line described above can be crossed with an improved elite WT line, and improved new maintainer and male-sterile lines selected out from the resulting progeny (FIGS. 18-20). After about five to six generations, maintainer and male-sterile will have introgressed into new elite material. With Single Seed Descent/Speed-Breeding (see, e.g., Watson et al. Nature Plants 2018 4:23-29, which is incorporated by reference herein in its entirety) on this material and selection for maximum conformity with the elite parent, fully useable new lines can be provided.

[1286] Herbicide tolerance. An addition to the processes described above can be to add a herbicide tolerance gene to each of the two cassettes, either in initial creation of a maintainer line or introducing the maintainer traits into a new elite line. This would allow, for example, an easier and far larger-scale selection for the new elite parent genotype. A field or greenhouse spray of, for example, jiffy pot plants would then allow the selected plants to be planted in the field as a uniformly-spaced population for field selection. This could be important as a means to increase the elite-line conformity in what is the recurrent pollen parent and thus the source of the long-term genotype. (FIG. 21).

[1287] Maximum breeding gain from standard breeding progress can also be achieved by just introgressing the maintainer cassettes into new lines and then doing CRISPR knockout of the endogenous MFW and PV genes.

### Example 4

### Producing a Maintainer

[1288] A selected wild-type elite wheat line can be transformed with two expression cassettes containing three genes which are ‘knocked in’: Mfw and BA in a single cassette (MFW:BA, total of ˜42 Kbp cassette or could be ˜24 Kbp as in FIG. 31B), the other cassette with PV (˜10 kb). This can be done using, e.g., a Zinc-Finger Nuclease to make the insertion at a selected ‘landing site’ (unrelated to either endogenous gene locus). Exemplary landing sites are known in the art, e.g., the ANXA1 locus as described in WO 2013/169802, which is incorporated by reference herein in its entirety.

[1289] The MFW and PV genes within the two maintainer cassettes are designed to have (or naturally have) synonymous differences/edits (compared to wild-type) at the planned CRISPR/Cas9 knockout guide sites. This is so that they are not recognised by the CRISPR knockout guides at the later male-sterility-creating stage (Step 2); their mRNA and amino acid sequences are unchanged so they code for/produce normal fertile phenotypes. (These subtly different or edited sequences are denoted MFW′ and PV′ hereafter).

[1290] T0 plants from each experiment are identified which have successful insertions of MFW′:BA and PV′ respectively, each in a hemizygous form (FIG. 22). A plant of each is crossed. Embryos on the resultant F1 plants (so F2) are then subjected to CRISPR-Cas9 knockout of all endogenous copies of MFW and PV—see FIG. 23.

### Producing the Maintainer and Male-Sterile Lines Together

[1291] All endogenous copies of MFW and PV can be mutated/knocked-out by CRISPR/Cas9. The inserted MFW′ and PV′ expression cassettes (FIG. 22) will not be CRISPR-targeted/mutated due to the CRISPR editing guides not recognising/targeting the slight/synonymous DNA sequence changes/differences at the CRISPR/Cas9 guide sites of the inserted genes.

[1292] Being F2, ˜25% of the embryos targeted are heterozygous MFW′:BA/PV′; plants of these become the new maintainer (upper portion of FIG. 23). ˜50% of the embryos targeted are homozygous null insert or hemizygous PV′/−; plants of these, having no inserted MFW′ and successful knockouts of all endogenous MFW and PV genes, become the new male-sterile (lower portion of FIG. 23).

[1293] The fertility/sterility phenotype of the maintainer plants and their gametes is now dependent on the two inserted allelic ‘constructs’: MFW′:BA and PV′ (so hereon in this Example knocked out genes are shown in grey/smaller as they are not relevant to the phenotype). Male-fertility is expressed strongly by MFW′ to such an extent that one allele can restore full fertility, resulting in good maintainer pollen production and seed yields. This is demonstrated experimentally below herein.

[1294] As shown in FIG. 24, these plants' viable pollen will not carry the MFW′ gene: the 50% of the (haploid) pollen grains which carry the MFW′ gene have mutated pv genes only and so are non-viable (wild-type PV required for pollen germination). Hence no transfer of MFW male-fertility to the male-sterile.

### Maintaining the Maintainer (1)

[1295] In FIG. 24, the far left pollen genotype is disabled at pollen germination as it has no PV′ allele. The two right hand ovule genotypes have been enabled for fertilisation by pre-meiosis MFW′ as in the central heterozygote at the top of FIG. 24.

Creating the Maintainer and Male-Sterile Lines Together Once a Maintainer has Already been Created in a Program

[1296] In an established breeding program which already has a useable maintainer line with this system, the process shown in FIGS. 23 and 24 can be accelerated and simplified as follows.

[1297] A new elite line can be back-crossed onto the established maintainer plant (with significant numbers and marker-assisted selection it should be possible to achieve near isogenic lines (to the elite parent) in ˜three generations. In F2 and on, selection can proceed on strict agronomic traits just ensuring that there is >1 plant in the progeny which has PV′ and >1 which has MFW′/BA. When selection is near completion a selected plant with MFW′:BA can be crossed with a near isogenic selected plant with PV′. If available, one parent can be hemizygous in order to bring in a null locus for the male-sterile. If neither of these is present in hemizygous form, an initial cross can be done with a null-inserted-gene plant and the next stage can be performed a generation later.

[1298] Then, taking embryos from a few plants with the target genotype (ie it must include one genome with allelic MFW′:BA/PV′) all endogenous copies of MFW and PV are mutated/knocked-out by CRISPR/Cas9. If there is no appropriate heterozygote, then two complementary homozygote (most plants will be homozygous by this stage) can be crossed and the F1's embryos mutated (and a null insert plant mutated for the male-sterile plant to be obtained).

[1299] Again, the inserted MFW′ and PV′ expression cassettes will not be CRISPR-targeted/mutated and express the necessary fertility proteins. Plants for the new male-sterile can be selected from embryos which have homozygous PV′/PV′ and a full set of endogenous knockouts. Plants for the new maintainer can be selected from embryos with the heterozygous maintainer combination MFW′:BA/PV′ and a full set of endogenous knockouts. In other words, To plants with a full-set of knocked out endogenous genes are selected to become the new male-sterile: heterozygous MFW′:BA/PV′ (upper portion of FIG. 25) for the maintainer and homozygous PV′/PV′ (lower portion of FIG. 25)—or PV′/− or −/− after above secondary options. Thus both a new maintainer and new male-sterile are produced from the same experiment in the same new genetic background (FIG. 25 and FIG. 30). Further ‘fine-tuning’, for example, for certification criteria can be effected by selection for relevant traits within the maintainer line—improvements will be passed on to the male-sterile by recurrent fertilisation with the maintainer.

Creating the Maintainer and Male-Sterile Lines Together Once a Maintainer has Already been Created in a Program—by Normal Crossing

[1300] In an established breeding program which already has a useable maintainer line with this system, the process shown in FIGS. 23 and 24 can be accelerated and simplified as follows.

[1301] A new elite line can be back-crossed onto the established maintainer plant. The first F1. generation will be heterozygous at all endogenous loci/hemizygous at the new locus. In the F2, all loci have a ¼ chance of being homozygous for the desired knockout so with six loci there is a 1/4096 chance of all endogenous MF and PV loci being homozygous knockouts. Of those, ¼ (˜ 1/16000) will be MF′:BA/PV′ (for the maintainer) and ½ (˜ 1/8000) will be PV′/− or PV′/PV′ (for the male-sterile). Then there is the primary need to have a large enough remaining population to be able to select for the segregants with the best agronomic phenotype like the elite cv parent. An alternative strategy would be to select initially for agronomic elite type and then select for those segregates with the best combination of homozygous and heterozygous maintainer alleles (FIG. 26). Particularly if Ms1 (expressed only from the B genome thus reducing the rate of deselection needed) is used as the MF gene, a further alternative strategy would be to PCR-select initially (in F2 and F3 seeds) for the necessary combination of hybrid system alleles (FIGS. 35A-35C) leaving agronomic and other traits for selection in later generations.

[1302] Where regulatory approval for genome edited plants is/becomes reasonably easy and with increasingly widespread ability to use CRISPR-Cas technology, the preceding strategy may be most efficient.

### Maintaining the Maintainer—and Producing Male-Sterile Seed at the Same Time

[1303] FIG. 27 depicts an approach for maintaining the maintainer line and generating male-sterile seed at the same time (the production of these gametes is shown in FIG. 24). FIG. 28 depicts an approach for male-sterile production from the maintainer line of FIG. 27 when the approach of FIG. 27 will not provide sufficient male-sterile progeny.

### Advantages of Described System

[1304] The BA gene's grain phenotype has been shown to be dose-related, but one allele's expression is enough for a darker-grained phenotype to be colour-selectable. In fact in the maintainer's endosperm there will be two BA alleles from the ovule/maternal side and null from the pollen/paternal side. Being from the same bread wheat species all the introduced genes described herein will be from the same species which will promote regulatory approval and end-market acceptability.

[1305] After harvest of a male-sterile seed production crop, the 50% of the darker-grained mainainer/pollinator's seed (˜5% of the total) which is male-fertile (self-maintained maintainer) can be colour-sorted out of the male-sterile grain. With a three-chute colour-sorter tuned to discard any ‘borderline’ grain, the darker-grain part becomes recycled maintainer seed.

[1306] The other non-borderline 50% seed from the maintainer (similarly ˜5% of the total) is male-sterile with effectively the same genotype as the male-sterile itself so (see FIG. 24) and efficiently adds to the male-sterile yield as part of the same process. (The difference is that, compared to the main male-sterile, it only has one PV allele so in the final farmer customer's field with the wt/ms F1 heterozygote, this small proportion of the total plants, ˜ 1/19, will have ⅙ less viable pollen than other plants. Given the pollen surplus present in the field, this decrease of pollen production will not negatively impact crop production.

[1307] In the final F1 seed production field (FIG. 29), the wild-type pollinator can be be mixed with the male-sterile line for an effective spread of pollen within the F1 seed crop. A ratio of 1:15 (˜7%), for example, will keep the pollinator seed below 10% of the plants in the final F1 seed crop and the seed crop can be harvested as this mix.

[1308] When the F1 plants produced according to FIG. 29 are grown, all plants' flowers will be pre-meiosis-male-fertile as all have a copy of MFW from the wild-type parent. In this population, 1/16* or 6.25% of pollen grains will have no PV allele so that proportion of pollen grains will be non-viable. With the huge ‘excess’ of pollen production in a wheat flower, having ˜6% non viable/non-germinating pollen grains will not negatively effect crop yields. The 94% which are viable due to the presence of a PV allele will be ample.

[1309] *Each pollen grain needs only one PV allele to be viable. Each normal PV locus is heterozygous in the parent so, in the haploid pollen grain genome, there is a ½ probability of having thepv allele in each genome. So ⅛ have no normal-locus PV allele. Then there is a ½ chance of these also having a PV allele from the MFW-linked locus, so only 1/16 pollen grains have no PV allele.

### Example 5

[1310] PV1/NPG1 was deleted using CRISPR and guide RNAs as described herein. The genome and phenotypes of the resulting plants were examined and are presented in Table 3. As evidenced by AK30A.1.2, when each of the six alleles of PV1 in the genome are loss-of-function alleles, the plant displays a complete male-sterility phenotype.

TABLE 3
Genotypes are indicated as wild-type [WT}, het [indicating one mutant/one WT) or
−xbp [showing the number of base-pairs deleted where that data is available]. The
Tiller number is an indication of plant growth, with >7 tillers/plant indicative of well-grown plants.

| | A Genome | | B Genome | | D Genome | | | Seed | Seed | Tiller |
|---|---|---|---|---|---|---|---|---|---|---|
| Sample | guide 1 | guide 2 | guide 1 | guide 2 | guide 1 | guide 2 | guide 3 | number | weight | number |
| AK30A.1.1 | WT | bp +1/WT | bp +29 | bp +1 | WT | bp +1 | WT | 228 | 9 | 10 |
| AK30A.1.2 | WT | bp +1/bp −7 | bp +29 | bp +1 | WT | bp −172 | bp −172 | 0 | 0 | 11 |
| AK30A.1.3 | WT | bp +1 | WT/bp +29 | bp +1 | WT/bp −13 | bp +1 | WT | 276 | 12 | 8 |
| AK30A.3.1 | WT | bp +1 | WT | bp +1 | WT | het | WT | 332 | 14.4 | 7 |
| AK30A.3.2 | ? | het | WT | bp +1 | WT | bp +1 | WT | 425 | 15.2 | 11 |
| AK30A.3.3 | WT | bp +1/bp −10 | bp −1/WT | bp +1/WT | WT | bp −512 | bp −512 | 360 | 16.7 | 8 |
| AK30A.3.4 | WT | bp +1 | het | bp +1 | WT | het | WT | 319 | 14.7 | 7 |
| AK30A.3.5 | WT | bp +1 | WT | bp +1 | WT | het | WT | 333 | 14.5 | 8 |
| AK30B.3.1 | WT | bp +1 | het | het | Het | bp+1 | WT | 277 | 10.8 | 9 |
| AK33.5.1 | WT | bp +1 | ? | het | WT | het | WT | 335 | 15.3 | 7 |
| AK33.5.2 | WT | bp −1 | WT | het | WT | bp +1 | WT | 294 | 13.6 | 8 |

### Example 6

PV1 and Mfw2:BA1 Knocked in at a Non-Mfw2 or -PV1 Loci in Wheat in Order to Produce, after Appropriate Crossing and Selection, a PV1 Knock-In in One of the Two Homologous Loci and Mfw2:BA1 in the Other Homologous Locus so that they Become Sister Alleles at that Locus.

[1311] To produce plants with targeted insertion of PV1 and Mfw2:BA1, a CRISPR CAS system or ZFN or other site-directed nuclease system can be employed to introduce these gene transfers at a desired location in wheat plants to introduce the genes PV1 and Mfw2.

[1312] For the insertion of PV1, a construct can be made with the wheat PV1 genomic sequence driven by ˜1.5 kb of its own promoter and ˜1 kb of its terminator. This DNA sequence is changed minimally (2 bp) (or a rare natural variant is chosen)—enough sequence variation to disrupt the possibility of a future guide RNA targeted at endogenous PV1 from editing this sequence once it is introgressed into the wheat genome and enough to be able to PCR-select for it but not for endogenous PV1. This will include changing the DNA sequence from GTCGCCCCTCCTGAGGCGGCGG (SEQ ID NO: 166) which is the nuclease target in the native PV1 sequence to GTCGCCCCTCCTGAGGCAGCAG (SEQ ID NO: 167) which will not change the amino acid sequence of the protein but not allow the guide to target the introgressed PV1. This different/adapted PV1 is titled PV1′.1 hereafter and the complete sequence of PV1′.1 is provided in SEQ ID NO: 172. SEQ ID NO: 172 provides a construct for PV1 genomic introgression, the construct comprising PV1′.1 with the endogenous PV1 promoter. The altered guide RNA target sequence (SEQ ID NO: 167) is found at nucleotides 2,169-2,190 of SEQ ID NO: 172. PV1′.1 DNA along with a binary vector containing a wheat optimized Cas9 driven by the maize ubiquitin promoter and guide RNA driven by a TaU6 PollIl promoter targeting PV1 can be introduced into wheat embryos either by biolistics or agrobacterium mediated transformation. An alternative strategy would be to find, e.g. from an exome sequence database (see, e.g., He, F. et al. Nat. Genet. 2019 515, 51, 896-904; which is incorporated by reference herein in its entirety) a rare natural/endogenous variant whose sequence would then become MF′ or PV′.

[1313] Plants can then be screened for insertion of the gene using a PCR based method where the PCR product is amplified for each homoeologue anchored to the possible insertion and sequenced to verify insertion. Plants can be selected which have the PV1′.1 insertion or the insertion of Mfw2 (as follows).

[1314] For the insertion of Mfw2, again an intermediate construct can be made with Mfw2 cDNA driven by 1.5 kb of its own promoter and 1 kb of its terminator followed by BA1 driven by the high molecular weight glutenin promoter and 1 kb of its native terminator. This DNA sequence is changed minimally (2 bp)—enough to disrupt the possibility of a future guide RNA targeted at Mfw2 from editing the Mfw2 sequence once it is introgressed into the wheat genome and enough to be able to PCR-select for it but not for endogenous Mfw2. This can include changing the DNA sequence from GGATGGCCAATGCGAGATGATGG (SEQ ID NO: 168) which targets the native Mfw2 sequence to GGATGGCCAATGCGAGACGACGG (SEQ ID NO: 169) which will not change the amino acid sequence of the protein but not allow the guide to target the introgressed Mfw2. This different/adapted Mfw2 is titled Mfw2′.1 hereafter and the complete sequence of Mfw2′.1 is provided in SEQ ID NO: 173. SEQ ID NO: 173 provides a construct for Mfw2 genomic introgression, the construct comprising Mfw2′.1 with the endogenous Mfw2 promoter, and followed by BA with wheat HMWG promoter, HMWG::TaBA1. The altered guide RNA target sequence (SEQ ID NO: 169) is found at nucleotides 7,257-7,279 of SEQ ID NO: 173 and the HMWG promoter is found at nucleotides 20,748-21,165 of SEQ ID NO: 173. This DNA along with a binary vector containing a wheat optimized Cas9 driven by the maize ubiquitin promoter and guide RNA driven by a TaU6 PolIII promoter targeting Mfw2′.1 can be introduced into wheat embryos either by biolistics or agrobacterium mediated transformation.

[1315] Plants can then be screened for insertion of the DNA sequence using a PCR based method where the PCR product is amplified for each homoeologue anchored to the possible insertion and sequenced to verify insertion of Mfw2′0.1. Plants can be selected which had the Mfw2′0.1:BA1 insertion on the same homoeologue as the PV1 insertion above. Plants with an insertion of either PV1′.1 or Mfw2′.1 can then be crossed to combine the inserted sequences in the same plant.

[1316] Immature embryos from plants from the previous cross would then have their endogenous Mfw2, and PV1 genes knocked out in all native loci except Mfw2 on the chromosomes containing the above constructs, this is the basis of the maintainer line. As only the chromosomes with the above knockins have a functional Mfw2 expressing Mfw2 protein, the other six homoeologous alleles will be knocked out.

[1317] In another embodiment for the production of the maintainer line the native Mfw2 and PV1 homoeologues can be knocked out first and the resulting sterile plant could be rescued by either a WT plant containing fully fertile pollen or a WT plant containing one of the knocked in DNA sequences. This cross could then be further crossed to combine both the knocked in DNA sequences and track the mutated PV1 and Mfw2 alleles to select for a plant in which the native Mfw2 and PV1 sequences are knocked out and a single copy of the inserted Mfw2′0.1:BA1 and PV1′.1 sequences are in the wheat genome.

### Example 7

[1318] A wheat plant in which all six copies of Mfw2 were knocked-out, by CRISPR-Cas targeting as described elsewhere herein. The plant was also confirmed to have all T-DNA, including Cas9, segregated out. This male-sterile plant was crossed with wild-type Fielder male-fertile plants to produce seed. The F1 progengy were heterozygous at all loci. The F2 progeny, with a total population of 69 plants, showed every potential combination of alleles across the three sub-genomes.

[1319] In particular, two plants with complete homozygous knockouts of all alleles of Mfw2 displayed complete male-sterility. All other plants/genotypes were fully fertile. This demonsrates that Mfw2 provides recessive male-sterility.

[1320] These two diploid plants must have been fertilised by viable haploid pollen grains to produce their homozygous genotype. The pollen grains concerned could not have been viable haploids if Mfw2 were post-meiosis as the lack of Mfw2 at that stage would have made them non-viable as independent haploid cells. They had the ‘protection’ of a single wild-type MW2 allele being expressed during diploid meiosis to pass through that stage. This provides proof of diploid-stage expression of Mfw2—to give vital meiosis-stage viability for the post-meiosis independent haploid pollen grains with knocked-out MW2 alleles which do not transfer Mfw2. (The ‘other allele’ pollen grains, with Mfw2, have no post-meiosis PV gene so are never viable to transfer their MW2 alleles.)

[1321] There were seven plants with one genome only having a MFW2/mfw2 heterozygous genotypes with other genomes having full knockouts; average seed set in these seven plants was actually higher than in wild type plants. This is proof of the effectiveness of Mfw2 from expression of a single wild type Mfw2 allele. It is further contemplated herein that embodiments relating to Mfw2 have higher seed yields than some other WT MFW/Ms genes.

TABLE 4
Mfw2 genotype expression. Demonstrates thte ability of
a single wild-type Mfw2 allele to maintain fertility.

| | Summarised | avg. seed weight | avg. seed number |
|---|---|---|---|
| Genotype details | Genotype | (g) per plant | per plant |
| Single Wild-type Mfw2/mfw2 het in | Aabbdd | 13.05 | 308.5 |
| A genome, all others knocked out | | | |
| Single Wild-type Mfw2/mfw2 het in | aaBbdd | 9.5 | 236.5 |
| B genome, all others knocked-out | | | |
| Single Wild-type Mfwe/mfw2 het in | aabbDd | 11.37 | 303.67 |
| D genome, all others knocked-out | | | |
| All alleles wild-type | AABBDD | 9.24 | 248 |
| (de facto control) | | | |
| All alleles knocked out | aabbdd | 0 | 0 |

### Example 8

PV1 and MsI:BA1 Knocked in at a Non-Ms1 or -PV1 Loci in Wheat in Order to Produce, after Appropriate Crossing and Selection, a PV1 Knock-In in One of the Two Homologous Loci and MsI:BA1 in the Other Homologous Locus so that they Become Sister Alleles at that Locus.

[1322] To produce plants with targeted insertion of PV1 and Ms1:BA1, a CRISPR CAS system or ZFN or other site-directed nuclease system can be employed to introduce these gene transfers at a desired location in wheat plants to introduce the genes PV1 and Ms1.

[1323] For the insertion of PV1, a construct can be made with the wheat PV1 genomic sequence driven by its own promoter and terminator. This DNA sequence is changed minimally (e.g., 1 bp)—enough sequence variation to disrupt the possibility of a future guide RNA targeted at endogenous PV1 from editing this sequence once it is introgressed into the wheat genome and enough to be able to PCR-select for it but not for endogenous PV1. This will include changing the DNA sequence from GATGCACTTTGTGTGTTTGATGG (SEQ ID NO: 260) which is the nuclease target in the native PV1 sequence to GATGCACTTTGTGTATTTGATGG (SEQ ID NO: 261) which will not change the amino acid sequence of the protein but not allow the guide to target the introgressed PV1. This different/adapted PV1 is titled PV1′.1 hereafter. PV1′.1 DNA along with a binary vector containing a wheat optimized Cas9 driven by the maize ubiquitin promoter and guide RNA driven by a TaU6 PolIII promoter targeting PV1 can be introduced into wheat embryos either by biolistics or agrobacterium mediated transformation.

[1324] Plants can then be screened for insertion of the gene using a PCR based method where the PCR product is amplified for each homoeologue anchored to the possible insertion and sequenced to verify insertion. Plants can be selected which have the PV1′.1 insertion or the insertion of Ms1 (as follows).

[1325] For the insertion of Ms1, again an intermediate construct can be made with a Ms1-encoding sequence (e.g., genomic Ms1 or cDNA) driven by 1.5 kb of its own promoter and 1 kb of it terminator followed by BA1 driven by a) the high molecular weight glutenin promoter and 1 kb of its native terminator or b) 1.5 kb of its own promoter and 1 kb of its own terminator. This DNA sequence is changed minimally (e.g., 1 bp)—enough to disrupt the possibility of a future guide RNA targeted at Ms1 from editing the Ms1 sequence once it is introgressed into the wheat genome and enough to be able to PCR-select for it but not for endogenous Ms1. This can include changing the DNA sequence from GCGGGCTGCTGCTGGTGGCGGGGG (SEQ ID NO: 219) which is the nuclease target in the native Ms1 sequence to GCGGGCTGCTGCTGGTGGCTGGAG (SEQ ID NO: 220) which will not change the amino acid sequence of the protein but not allow the guide to target the introgressed Ms1. Alternatively, this can include changing the DNA sequence from GGCTCGCAGCACTGCGCCGTCGG (SEQ ID NO: 262) which is the nuclease target in the native Ms1 sequence to GGCTCGCAGCACTGGGCCGTCGG (SEQ ID NO: 263) which will not change the amino acid sequence of the protein but not allow the guide to target the introgressed Ms1. This different/adapted Ms1 is titled Ms1′.1 hereafter. This DNA along with a binary vector containing a wheat optimized Cas9 driven by the maize ubiquitin promoter and guide RNA driven by a TaU6 PolIII promoter targeting Ms1′.1 can be introduced into wheat embryos either by biolistics or agrobacterium mediated transformation.

[1326] Plants can then be screened for insertion of the DNA sequence using a PCR based method where the PCR product is amplified for each homoeologue anchored to the possible insertion and sequenced to verify insertion of Ms1′.1. Plants can be selected which had the Ms1′.1:BA1 insertion on the same homoeologue as the PV1 insertion above. Plants with an insertion of either PV1′.1 or Ms1′.1 can then be crossed to combine the inserted sequences in the same plant.

[1327] Immature embryos or subsequent plant tissue from this cross would then have their endogenous Ms1, and PV1 genes knocked out in all native loci except Ms1 on the chromosomes containing the above constructs, this is the basis of the maintainer line. As only the chromosomes with the above knockins have a functional Ms1 expressing MS1 protein, the other two homoeologous alleles (the B genome homoeologues as WT Ms1 is only expressed from the two B genome copies) will be knocked out.

[1328] In another embodiment for the production of the maintainer line the native Ms1 and PV1 homoeologues can be knocked out first and the resulting sterile plant could be rescued by either a WT plant containing fully fertile pollen or a WT plant containing one of the knocked in DNA sequences. This cross could then be further crossed to combine both the knocked in DNA sequences and track the mutated PV1 and Ms1 alleles to select for a plant in which the native PV1 and Ms1 sequences are knocked out and a single copy of the inserted Ms1′.1:BA1 and PV1′.1 sequences are in the wheat genome.

[1329] A similar approach can be taken utilizing Mfw2 in place of Ms1 as the MF gene. For example, for the insertion of Mfw2, again an intermediate construct can be made with a Mfw2-encoding sequence (e.g., genomic Mfw2 or cDNA) driven by 1.5 kb of its own promoter and 1 kb of it terminator followed by BA1 driven by a) the high molecular weight glutenin promoter and 1 kb of its native terminator or b) 1.5 kb of its own promoter and 1 kb of its own terminator. This DNA sequence is changed minimally (2 bp)—enough to disrupt the possibility of a future guide RNA targeted at Mfw2 from editing the Mfw2 sequence once it is introgressed into the wheat genome and enough to be able to PCR-select for it but not for endogenous Mfw2. This can include changing the DNA sequence from GGATGGCCAATGCGAGATGATGG (SEQ ID NO: 168) which targets the native Mfw2 sequence to GGATGGCCAATGCGAGACGACGG (SEQ ID NO: 169) which will not change the amino acid sequence of the protein but not allow the guide to target the introgressed Mfw2. This different/adapted Mfw2 is titled Mfw2′.1 hereafter and the complete sequence of Mfw2′.1 is provided in SEQ ID NO: 173. SEQ ID NO: 173 provides a construct for Mfw2 genomic introgression, the construct comprising Mfw2′.1 with the endogenous Mfw2 promoter, and followed by BA1 with wheat HMWG promoter, HMWG::TaBA1. The altered guide RNA target sequence (SEQ ID NO: 169) is found at nucleotides 7,257-7,279 of SEQ ID NO: 173 and the HMWG promoter is found at nucleotides 20,748-21,165 of SEQ ID NO: 173. This DNA along with a binary vector containing a wheat optimized Cas9 driven by the maize ubiquitin promoter and guide RNA driven by a TaU6 PolIII promoter targeting Mfw2′.1 can be introduced into wheat embryos either by biolistics or agrobacterium mediated transformation.

### Example 9

[1330] The maintainer lines described herein can also be created by means of a process as follows. To create the maintainer line a cassette comprising the genomic sequence of four genes will be introduced at random into the wheat genome of an elite breeding line suitable to become a parent of an F1. The cassette comprises a MF′ gene, a PV′ gene, a seed color gene (or a set of seed color genes), and a selection gene. An exemplary PV3′ is provided in Example 10.

[1331] This will result, in at least one plant, in strong expression of the introduced genes and complementation of the native sequences of Mfw2 and PV3. The introduced genomic DNA sequences of the MF gene (e.g., Mfw2) and the PV gene (e.g., PV3) will be modified slightly with subtle DNA-sequence SNP's to allow for next-stage targeting of the native sequences via CRISPR/Cas9 but with no change to the amino acid sequences of the encoded genes (these subtly different/adapted genomic sequences (which can be naturally-occurring) are titled Mfw2′ and PV3′ hereafter and similar designed/engineered sequences are described in detail elsewhere herein).

[1332] A diagram of the relevant cassette sequence for the initial (insertion stage) transformation is shown in FIG. 31. Such cassettes can be T-DNA sequences. The cassette itself comprises, in 5′ to 3′ or 3′ to 5′ order: i) the full genomic sequence of Mfw2′ and a seed color marker gene (or at least one functional ectopic allele of each member of a set of seed color genes), for example BA2 (with Mfw2′ and BA2 in either order relative to each other); this will be followed by ii) a selection gene, for example nptII, finally followed by iii) the full genomic sequence of PV3′. The cassette can be incorporated into the genome in either orientation with respect to any reference point in the genome. To ensure that both pollen fertility genes are at the same locus in the genome and that they segregate independently after the second transformation, four further sequences can also be included in the modification of the original cassette. These sequences include two 34 bp Cre-lox recognition sequences flanking the start of the Mfw2′ sequence and following the nptII selection gene; the other two can be the 34 bp flippase recognition sequences flanking the start of nptII and following PV3′ in order, at the next stage, to recombine out the selection gene and PV3′ [1-4]. It is contemplated that the location of the Cre-Lox and flippase sequences can be reversed. These sequences will be located before the start of selection marker and after the PV3′ genomic sequence. All these are shown in FIGS. 31B-D. An exemplary cassette utilizing PV1′ as the PV gene is provided as SEQ ID NO: 221. An exemplary cassette utilizing PV3′ as the PV gene is provided as SEQ ID NO: 232.

[1333] An exemplary embodiment of PV3 and PV3′ sequences include the common PV3 sequence of sequence from CCTTCTCCTCCACCGCGGGGCTG (SEQ ID NO: 264) which is the nuclease target in the native PV3 sequence to CCTTCTCATCCACCGCGGGGCTG (SEQ ID NO: 265) which will not change the amino acid sequence of the protein but not allow the guide to target the introgressed PV3′. This is naturally-occurring rare SNP, found at less than 0.01% frequency. In this embodiment, an exemplary guide is GTGGCCCAGCCCCGCGGTGGAGG (SEQ ID NO: 266).

[1334] Plants are selected based on a single copy insertion in the genome and plants which have good expression of BA2 at flowering/seed development to prove that the insertion has taken place at an effective locus for these genes to be truly expressed when they need to be and maintain fertility of the plant. Such plants are then, at a second stage, retransformed with either Cre-lox or with flippase to drop out either Mfw2′:BA2 (and nptII) to leave just the PV3′ in that/those plants or drop out PV3′ (and nptII) and leave just Mfw2′:BA2 in the other plant(s).

[1335] Using PCR-based selection (eg with appropriate KASP primers) one or more plants are selected which have just the Mfw2′:BA2 remaining and one or more plants are selected which have just the PV3′ remaining. These are crossed to produce F1 embryos which have the allelic pair Mfw2′:BA2/PV3′ at the new locus. (If there are no plants with only one or the other inserted allele, hemizygotes can be used but clearly more crosses will need to be made to ensure the correct F1 heterozygous embryos are available for the next stage.)

[1336] These embryos are then transformed in the following final/third stage with a CRISPR/Cas9 and appropriate sgRNAs to make knock outs of the native sequences of all six copies of endogenous Mfw2 and of PV3. This creates the final maintainer line with knockouts of the three native homeologues of Mfw2 and PV3—with necessary expression of these genes being effected by the single copies of Mfw2′ and PV3′ at the new locus in the genome. (If all six homoeologues of each gene are not knocked out in one plant, plants with hemizygous knockouts can be selected and, in their progeny, plants/segregates with all knockouts can be selected). See FIG. 32A.

[1337] The corresponding male-sterile line can also be created during this step (FIG. 32B). Specifically, when parents were hemizygous, F2 cross progeny are ˜25% of the embryos targeted for knock-out of the endogenous Mfw2 and PV3 will be heterozygous Mfw′:BA/PV′; plants and constitute the maintainer plants. At the same time, ˜50% of the embryos/plants targeted are homozygous null for the insert or hemizygous PV′/−. These plants, having no inserted Mfw′ and with successful knockouts of all endogenous Mfw and PV genes are male-sterile.

[1338] Alternatively, where all three genomes' pairs (e.g., all three homoeologue pairs) of each gene are not knocked out in one plant and there are one or more remaining unmutated Mfw and PV alleles (and thus the plant is male-fertile), such plant(s) with hemizygous knockouts can be selected and, in their progeny, plants/segregates with all knockouts can be selected. The progeny with no inserted genes are the male-sterile and those with inserts are the maintainer.

[1339] Another possibility for the third stage or as part of the original T-DNA is that the Cas9 can be fused to a reverse transcriptase to allow for prime editing of a desired location in Mfw2 and PV3, thereby creating a premature stop codon. In this instance PCR based KASP primers can be designed to differentiate between the prime edited locations and the inserted Mfw2′ and PV3′ in future generations. Such an approach makes it possible that ‘conversion’ to a maintainer and its isogenic male-sterile can be achieved in two generations.

[1340] Accordingly, one or more plants from the above—with inserted Mfw2′:BA2 and PV3′ as an allelic pair and complete knockouts/prime edits of endogenous genes—become a new maintainer-line. Its progeny will be 50% dark-seed-color maintainer and 50% WT-seed-color male-sterile as described elsewhere in this application. As already mentioned above, one or more progeny plants with only one remaining inserted PV3 gene or only one Mfw2:BA1 gene pairs and with all six homoeologous alleles of both Mfw2 and PV3 knocked out/prime edited, these become the relevant matched pair of a male-sterile and a maintainer to pollinate and maintain it.

[1341] In summary, in exemplary embodiments, the method comprises:

[1342] Step 1. The selected wild-type elite wheat line is transformed with one random-site knockin of a cassette (FIGS. 31C-31D) containing all three genes: Mfw′ linked to a color marker such as BA1 or BA2 and PV′ (e.g., ˜60 kb in total as in FIG. 31D) along with two pairs of ‘cut sequences’ to produce a number of T₀ plants comprising the cassette.

[1343] Step 2. A plant with the best expression level of BA1 or BA2 (indicating a good insertional-site) is selected for excision-transformation. Some embryos/seeds from this parent plant are retransformed to excise Mfv′:BA2:nptII and some to excise nptII:PV′ resulting in Step 2 To genotypes as in FIG. 32A. That is, Mfw′:BA2:nptII will be cut out of one offspring and nptII:PV′ cut out of another to leave these two genotypes (FIG. 32A) with ‘allelic’ inserts at homologous loci. A hemizygote or null-insert plant is also selected for Step 3.

[1344] Step 3. The two genotypes resulting from Step 2 are crossed. Embryos/plants on the resultant F1 plants (so F2 embryos) are then subjected to CRISPR-Cas knockout of all endogenous sequences of Mfv and PV—see FIG. 32B. A null-insert/Insert hemizygote plant is also selected for knockouts (to become the male-sterile).

[1345] It is contemplated that two or three of the above three stages can be combined into one or two larger-number experiment(s).

### REFERENCES

[1346] 1. Mlynarova L, Conner A J, Nap J P. Directed microspore-specific recombination of transgenic alleles to prevent pollen-mediated transmission of transgenes. Plant Biotechnol J. 2006; 4:445-52.
[1347] 2. Luo K, Duan H, Zhao D, Zheng X, Deng W, Chen Y, et al. “GM-gene-deletor”: fused loxP-FRT recognition sequences dramatically improve the efficiency of FLP or CRE recombinase on transgene excision from pollen and seed of tobacco plants. Plant Biotechnol J. Plant Biotechnol J; 2007; 5:263-374.
[1348] 3. Khattri A, Nandy S, Srivastava V. Heat-inducible Cre-lox system for marker excision in transgenic rice. J Biosci. J Biosci; 2011; 36:37-42.
[1349] 4. Djukanovic V, Lenderts B, Bidney D, Lyznik L A. A Cre::FLP fusion protein recombines FRT or loxP sites in transgenic maize plants. Plant Biotechnol J. 2008; 6:770-81.

### Example 10

[1350] The maintainer lines described herein can also be created by means of a process as follows. To create the maintainer line a cassette comprising the genomic sequence of four genes will be introduced at random into the wheat genome of an elite breeding line suitable to become a parent of an F1. The cassette comprises a MF′ gene, a PV′ gene, a seed color gene (or a set of seed color genes), and a selection gene.

[1351] This will result, in at least one plant, in strong expression of the introduced genes and complementation of the native sequences of Ms1 and PV3. The introduced genomic DNA sequences of the MF gene (e.g., Ms1) and the PV gene (e.g., PV3) will be modified slightly with subtle DNA-sequence SNP's to allow for next-stage targeting of the native sequences via CRISPR/Cas9 but with no change to the amino acid sequences of the encoded genes (these subtly different genomic sequences (which can be naturally-occurring) are titled Ms1′ and PV3′ hereafter and similar selected/engineered sequences are described in detail elsewhere herein). (As in Example 7, an alternative strategy would be to find, e.g., from an exome sequence database (see, e.g., He, F. et al. Nat. Genet. 2019 515, 51, 896-904; which is incorporated by reference herein in its entirety) a rare natural/endogenous variant whose sequence would then become MF′ or PV′.)

[1352] A diagram of the relevant cassette sequence for the initial (insertion stage) transformation is shown in FIGS. 31A-31B. Such cassettes can be T-DNA sequences. The cassette itself comprises, in 5′ to 3′ or 3′ to 5′ order: i) the full genomic sequence of Ms1′ and a seed color marker gene (or at least one functional ectopic allele of each member of a set of seed color genes), for example BA1 (with Ms1′ and BA1 in either order relative to each other); this will be followed by ii) a selection gene, for example nptII, finally followed by iii) the full genomic sequence of PV3′. The cassette can be incorporated into the genome in either orientation with respect to any reference point in the genome. To ensure that both pollen fertility genes are at the same locus in the genome and that they segregate independently after the second transformation, four further sequences can also be included in the modification of the original cassette. These sequences include two 34 bp Cre-lox recognition sequences flanking the start of the Ms1′ sequence and following the nptII selection gene; the other two can be the 34 bp flippase recognition sequences flanking the start of nptII and following PV3′ in order, at the next stage, to recombine out the selection gene and PV3′ [1-4]. It is contemplated that the location of the Cre-Lox and flippase sequences can be reversed. These sequences will be located before the start of selection marker and after the PV3′ genomic sequence. All these are shown in FIGS. 31C-D. An exemplary cassette utilizing PV1′ as the PV gene is provided as SEQ ID NO: 221. An exemplary cassette utilizing PV3′ as the PV gene is provided as SEQ ID NO: 232.

[1353] Plants are selected based on a single copy insertion in the genome and plants which have good expression of BA1 at flowering/seed development to prove that the insertion has taken place at an effective locus for these genes to be truly expressed when they need to be and maintain fertility of the plant. Such plants are then, at a second stage, retransformed with either Cre-lox or with flippase to drop out either Ms1′:BA1 (and nptII) to leave just the PV3′ in that/those plants or drop out PV3′ (and nptII) and leave just Ms1′:BA1 in the other plant(s).

[1354] Using PCR-based selection (eg with appropriate KASP primers) one or more plants are selected which have just the Ms1′:BA1 remaining and one or more plants are selected which have just the PV3′ remaining. These are crossed to produce F1 embryos which have the allelic pair Ms1′:BA1/PV3′ at the new locus. (If there are no plants with only one or the other inserted allele, hemizygotes can be used but clearly more crosses will need to be made to ensure the correct F1 heterozygous embryos or plants are available for the next stage.)

[1355] These embryos are then transformed in the following final/third stage with a CRISPR/Cas9 and appropriate sgRNAs to make knock outs of the native sequences of all eight copies of endogenous Ms1 and of PV3: two Ms1 and six PV3. This creates the final maintainer line with knockouts of the native homeologues of Ms1 and PV3—with necessary expression of these genes being effected by the single copies of Ms1′ and PV3′ at the new locus in the genome. (If both homoeologues of endogenous Ms1 and all six homoeologues of PV3 are not knocked out in one plant, plants with hemizygous knockouts can be selected and, in their progeny, plants/segregates with all knockouts can be selected). See FIG. 32A.

[1356] The corresponding male-sterile line can also be created during this step (FIG. 32B). Specifically, when parents were hemizygous, F2 cross progeny are ˜25% of the embryos targeted for knock-out of the endogenous Ms1 and PV3 will be heterozygous Mfw′:BA/PV′; plants and constitute the maintainer plants. At the same time, ˜50% of the embryos targeted are homozygous null for the insert or hemizygous PV′/−. These plants, having no inserted Mfw′ and with successful knockouts of all endogenous Mfv and PV genes are male-sterile.

[1357] Alternatively, where all three genomes' relevant pairs (e.g., all three homoeologue pairs of PV3 and both of the single-genome MF (e.g, Ms1)) of each gene are not knocked out in one plant and there are one or more remaining unmutated Mfw and PV alleles (and thus the plant is male-fertile), such plant(s) with hemizygous knockouts can be selected and, in their progeny, plants/segregates with all knockouts can be selected. The progeny with no inserted genes are the male-sterile and those with inserts are the maintainer.

[1358] Another possibility for the third stage or as part of the original T-DNA is that the Cas9 can be fused to a reverse transcriptase to allow for prime editing of a desired location in Ms1 and PV3, thereby creating a premature stop codon. In this instance PCR based KASP primers can be designed to differentiate between the prime edited locations and the inserted Ms1′ and PV3′ in future generations. Such an approach makes it possible that ‘conversion’ to a maintainer and its isogenic male-sterile can be achieved in two generations.

[1359] Accordingly, one or more plants from the above—with inserted Ms1′:BA1 and PV3′ as an allelic pair and complete knockouts/prime edits of endogenous genes—become a new maintainer-line. Its progeny will be 50% dark-seed-color maintainer and 50% WT-seed-color male-sterile as described elsewhere in this application. As already mentioned above, one or more progeny plants with only one remaining inserted PV3 gene or only one Ms1:BA1 gene pairs and, with both homoeologous alleles of Ms1 and all six of PV3 knocked out/prime edited; these become the relevant matched pair of a male-sterile and a maintainer to pollinate and maintain it.

[1360] In summary, in exemplary embodiments, the method comprises:

[1361] Step 1. The selected wild-type elite wheat line is transformed with one random-site knockin of a cassette (FIGS. 31C-31D) containing all three genes: Mfw′ linked to a color marker such as BA1 and PV′ (e.g., ˜60 kb in total) along with two pairs of ‘cut sequences’ to produce a number of T₀ plants comprising the cassette.

[1362] Step 2. A plant with the best expression level of BA1 (indicating a good insertional-site) is selected for excision-transformation. Some embryos/seeds from this parent plant are retransformed to excise Mfv′:BA:nptII and some to excise nptII:PV′ resulting in Step 2 T₀ genotypes as in FIG. 32A. That is, Mfw′:BA:nptII will be cut out of one offspring and nptII:PV′ cut out of another to leave these two genotypes (FIG. 32A) with ‘allelic’ inserts at homologous loci. A hemizygote or null-insert plant is also selected for Step 3.

[1363] Step 3. The two genotypes resulting from Step 2 are crossed. Embryos/plants on the resultant F1 plants (so F2 embryos) are then subjected to CRISPR-Cas knockout of all endogenous sequences of Mfv and PV— see FIG. 32B. A null-insert/Insert hemizygote plant is also selected for knockouts (to become the male-sterile).

[1364] It is contemplated that two or three of the above three stages can be combined into one or two larger-number experiment(s).

[1365] An exemplary PV3′ comprises a change in the DNA sequence from CCTTCTCCTCCACCGCGGGGCTG (SEQ ID NO: 255) which is the nuclease target in the native PV3 sequence to CCTTATCCTCCACCGCGGGGCTG (SEQ ID NO: 256) which will not change the amino acid sequence of the protein but not allow the guide to target the introgressed PV3. This different/adapted PV3 is titled PV3′0.1 hereafter. The CDS sequence of PV3 is provided as SEQ ID NO: 257 and the CDS of PV3′0.1 is provided as SEQ ID NO: 258. The altered guide RNA target sequence (SEQ ID NO: 256) is found at nucleotides 1,463-1,485 of SEQ ID NO: 258. An examplary guide sequence for use with PV3′0.1 is therefore SEQ ID NO: 255. A maintainer example with Ms1 HMWG:BA1 nptII and PV3/RUPO is provided in SEQ ID NO: 259.

### REFERENCES

[1366] 1. Mlynárová L, Conner A J, Nap J P. Directed microspore-specific recombination of transgenic alleles to prevent pollen-mediated transmission of transgenes. Plant Biotechnol J. 2006; 4:445-52.
[1367] 2. Luo K, Duan H, Zhao D, Zheng X, Deng W, Chen Y, et al. “GM-gene-deletor”: fused loxP-FRT recognition sequences dramatically improve the efficiency of FLP or CRE recombinase on transgene excision from pollen and seed of tobacco plants. Plant Biotechnol J. Plant Biotechnol J; 2007; 5:263-374.
[1368] 3. Khattri A, Nandy S, Srivastava V. Heat-inducible Cre-lox system for marker excision in transgenic rice. J Biosci. J Biosci; 2011; 36:37-42.
[1369] 4. Djukanovic V, Lenderts B, Bidney D, Lyznik L A. A Cre::FLP fusion protein recombines FRT or loxP sites in transgenic maize plants. Plant Biotechnol J. 2008; 6:770-81.

### Example 11

Targeted Insertion of Cre-Lox Sequence at a PV Site and Subsequent Insertion of MFW′:BA (Eg Mfw2′:BAI or Ms1′:BA1) at that Site.

[1370] A targeted insertion of a recombination type sequence, ie Cre-lox (with alternatives being sequences for recombination via flippase or I-SceI), can be inserted at a target location (the gRNA target site) using a Cas9-fusion to VirD to allow anchoring to the target site (Ali et al., 2020). Using this gRNA target site we can incorporate the 68 base pairs necessary for recombination at one or all PV sites, e.g. SEQ ID NO: 232 for PV3.

[1371] The 68 base pair Cre-lox sequence with an added right border binding sequence and homologous flanking sequence can be introduced as a phosphorothioate-modified template using modified primers. The template and Cas9 fusion will be introduced into wheat via biolistic integration for maximum copy number integration. By way of non-limiting example, it is contemplated that employing a transient-expression technique such as in-planta particle bombardment (iPB) (Liu Y et al, 2021) with a high efficiency across genotypes and which does not involve an introgressed transgene would be particularly advantageous. Plants can then be screened for the inserted 68 bp sequence and grown on to be retransformed with a T-DNA containing the necessary recombinase sequence followed by Mfw′ (eg Ms1′ or Mfw2′) genomic sequence followed by a sequence encoding BA1. For example, a genomic BA1 sequence or BA1 cds or cDNA. (The individual genes' sequences may incorporated as more than one copy in order to enhance their expression levels). In some embodiments, both genes are driven by their endogenous promoters with appropriate sequences flanking these two wheat genes for recombination at the PV target site. Plants will then be screened for integration of the Mfw′:BA1 sequences at the PV insertion sites using site-specific primers. Those with the insertion at only one copy of the desired PV homoeologue can be selected for next stages. Once this integration is confirmed sites up and downstream of, and within, the PV insertion site as well as within a Mfv known to be editableed by CRISPR will again be used specifically be to targeted as well as other known PV guide targeting sites the specifically to drop out removal of the Cre-lox, flippase or I-SceI sequences used for integration. If employing a technique requiring introduction of T-DNA, all remaining T-DNAs will then be segregated away to create the final edited line in heterozygous (Mfw′:BA/PV) form which can be used as the maintainer and parent of the male-sterile. This integration step allows for the diploid-expressed Mfw′:BA sequence of the maintainer sequences to always be on the sister chromatid to the later-needed, haploid-expressed PV sequence. By setting up how these two genes segregate—as alternative ‘alleles’—we can ensure that the Mfw′:BA maintainer sequence always segregates against that of the PV gene. Furthermore, employing the PV gene in this way means the remaining endogenous alleles of PV3 can be knocked out with guides which are specific to the two genomes whose genes need to be mutated: guide 1 targeting two of the PV3 homeologues using the guide sequence GTATTGAAGAAGTTTTATCAGGG (SEQ ID NO: 253) and guide 2 targeting the endogenous Ms1-B using the guide sequence GGCTCGCAGCACTGCGCCGTCGG (SEQ ID NO: 267), or guide 4 TATATCCTCGGACGGAGAGATGG (SEQ ID NO: 254) [PAMs in bold]). This leaves just the one PV allele which is heterozygously-paired with Mfw′:BA as the only PV allele expressed. This ensures that the 50% of haploid pollen grains with the Mfw′:BA allele cannot also have the PV allele and so cannot germinate and fertilise any egg cells.)

### REFERENCES

[1372] Ali, Z., Shami, A., Sedeek, K., Kamel, R., Alhabsi, A., Tehseen, M., et al. (2020) Fusion of the Cas9 endonuclease and the VirD2 relaxase facilitates homology-directed repair for precise genome engineering in rice. Commun. Biol. 2020 31, 3, 1-13. Yuelin Liu, Weifeng Luo, Qianyan Linghu, Fumitaka Abe, Hiroshi Hisano,
[1373] Kazuhiro Sato, Yoko Kamiya, Kanako Kawaura, Kazumitsu Onishi, Masaki Endo, Seiichi Toki, Haruyasu Hamada, Yozo Nagira, Naoaki Taoka and Ryozo Imai (2012). In planta Genome Editing in Commercial Wheat Varieties. Front. Plant Sci. 12:648841.

1. A male-fertile maintainer plant for a male-sterile polyploid plant comprising:
a first genome comprising:
on a first chromosome of a pair of homologous chromosomes, at a single target locus, at least one functional ectopic allele of a MF gene and at least one functional ectopic allele of a seed color gene;
on a second chromosome of the pair of homologous chromosomes, at the target locus corresponding to the target locus of the first chromosome of the pair of homologous chromosomes, at least one functional ectopic allele of a PV gene;
loss-of-function alleles of the endogenous MF genes at the native MF gene loci and loss-of-function alleles of the endogenous PV genes at the native PV gene loci.

2.-7. (canceled)

8. A male-fertile maintainer plant for a male-sterile polyploid plant comprising:
a first genome comprising:
on a first chromosome of a pair of homologous chromosomes, at least one functional allele of a MF gene at the MF gene locus and at least one allele of a seed color gene;
on a second chromosome of the pair of homologous chromosomes, a loss-of-function allele of the MF gene at the MF gene locus and at least one ectopic functional allele of a PV gene;
and loss-of-function alleles of the PV gene at the native PV gene loci; and
at least one further genome, each of the further genomes comprising loss-of-function alleles of the MF gene at the native MF gene loci and loss-of-function alleles of the PV gene at the native PV gene loci.

9. The plant of claim 8, wherein the at least one functional allele of a MF gene is the endogenous wild-type functional allele of the MF gene or an ectopic copy of the MF gene.

10. (canceled)

11. The plant of claim 10, wherein the at least one functional allele of a MF gene and the at least one allele of a seed color gene are part of single construct.

12. The plant of claim 8, wherein an ectopic allele or ectopic copy of a gene is a nuclease-null or CRISPR-null allele.

13. The plant of claim 8, wherein the MF gene;
displays the same type of activity and shares at least 95% sequence identity with one or more of the genes of Table 1; Mfw2; or Ms1; or is selected from Table 1; Mfw2; and Ms1.

14.-18. (canceled)

19. The plant of claim 8, wherein the PV gene:
displays the same type of activity and shares at least 95% sequence identity with one or more of the genes of Table 2, PV3, PV1, or PV2; or
is selected from Table 2, PV3, PV1, and PV2.

20.-30. (canceled)

31. The plant of claim 8, wherein the at least one allele of a seed color gene is at least one of:
a seed coat gene;
a seed endosperm gene; and
exogenous.

32. The plant of claim 8, wherein the at least one allele of a seed color gene is blue aleurone (BA).

33. (canceled)

34. The plant of claim 8, wherein at least one of:
the at least one allele of a seed color gene and the at least one ectopic functional allele of a PV gene
is located within 10 cM of the MF gene loci.

35.-37. (canceled)

38. The plant of claim 8, wherein the only exogenous sequence in the genomes is the at least one allele of a seed color gene; or wherein the only ectopic sequence in the genomes is the at least one ectopic functional allele of a PV gene.

39. (canceled)

40. The plant of claim 8, wherein the plant is tetraploid and the second genome comprises loss-of-function alleles of the MF gene at the native MF gene loci and loss-of-function alleles of the PV gene at the native PV gene loci; or wherein the plant is hexaploid and the second and third genomes both comprise loss-of-function alleles of the MF gene at the native MF gene loci and loss-of-function alleles of the PV gene at the native PV gene loci.

41. (canceled)

42. The plant of claim 8, wherein a loss-of-function allele is at least one of:
a) an allele comprising an engineered knock-out modification;
b) an allele comprising an engineered excision of at least part of a coding sequence or regulatory sequence; or
c) engineered using a site-specific guided nuclease.

43. (canceled)

44. (canceled)

45. The plant of claim 42, wherein the site-specific guided nuclease is a form of CRISPR-Cas.

46. The plant of claim 8, wherein the plant is wheat, triticale, canola/oilseed rape, indian mustard, barley, rice, oat, or rye.

47. (canceled)

48. The plant of claim 40, wherein the at least one allele of a seed color gene comprises a sequence from T. aestivum, T durum, T. monococcum or another Triticum aestivum-crossable species.

49. The plant of claim 46, wherein the plant is hexaploid wheat or tetraploid wheat, Triticum aestivum, or Triticum durum.

50. A method of preparing a male-fertile maintainer plant for a male-sterile polyploid plant, the method comprising engineering a plant to comprise:
in a first genome:
on a first chromosome of a pair of homologous chromosomes, at a single target locus, at least one functional ectopic allele of a MF gene and at least one functional ectopic allele of a seed color gene;
on a second chromosome of the pair of homologous chromosomes, at the target locus corresponding to the target locus of the first chromosome of the pair of homologous chromosomes, at least one functional ectopic allele of a PV gene; and
loss-of-function alleles of the endogenous MF genes at the native MF gene loci and loss-of-function alleles of the endogenous PV genes at the native PV gene loci.

51. A method of preparing a male-fertile maintainer plant for a male-sterile polyploid plant, the method comprising, simultaneously or sequentially:
inserting, on a first chromosome of a pair of homologous chromosomes in a first genome, at a single target locus, a construct comprising at least one functional ectopic allele of a MF gene and at least one functional ectopic allele of a seed color gene, optionally wherein the inserting comprises nuclease cleavage of the target locus and recombination or end-joining of the construct;
inserting, on a second chromosome of the pair of homologous chromosomes in the first genome, at the target locus corresponding to the target locus of the first chromosome of the pair of homologous chromosomes, a construct comprising at least one functional ectopic allele of a PV gene, optionally wherein the inserting comprises nuclease cleavage of the target locus and/or recombination or end-joining of the construct; and
mutating the the endogenous MF genes at the native MF gene loci and the endogenous PV genes at the native PV gene loci to create loss-of-function alleles, optionally wherein the loss-of-function alleles are caused by contacting the genome with a site-specific guided nuclease and one or more guide RNA sequences or multi-guide constructs.

52. A method of preparing a male-fertile maintainer plant for a male-sterile polyploid plant, the method comprising:
i. inserting, on a first chromosome of a pair of homologous chromosomes in a first genome, at a single target locus, a cassette comprising in 5′ to 3′ or 3′ to 5′ order:
a first recognition site for a first recombinase;
at least one functional ectopic nuclease null allele of a MF gene and at least one functional ectopic allele of a seed color gene in either relative order;
a first recognition site for a second recombinase;
a selection gene;
a second recognition site for the first recombinase;
at least one functional ectopic nuclease-null allele of a PV gene;
a second recognition site for the second recombinase;
thereby providing a full-cassette insertion plant;
ii. contacting a first progeny of the full-cassette insertion plant, or a cell thereof, with the first recombinase,
thereby excising:
one recognition site for the first recombinase, the at least one functional ectopic nuclease null allele of a MF gene and at least one functional ectopic allele of a seed color gene, the first recognition site for the second recombinase, and the selection gene from the genome of the first progeny and
thereby providing an excised first progeny comprising:
one recognition site for the first recombinase, the at least one functional ectopic nuclease-null allele of a PV gene, and the second recognition site for the second recombinase portions of the construct;
iii. contacting a second progeny of the full-cassette insertion plant, or a cell thereof, with the second recombinase,
thereby excising:
one recognition site for the second recombinase, the selection gene, the second recognition site for the first recombinase and at least one functional ectopic nuclease-null allele of a PV gene, and
thereby providing an excised second progeny comprising:
one recognition site for the second recombinase, the first recognition site for the first recombinase, and the at least one functional ectopic nuclease null allele of a MF gene and at least one functional ectopic allele of a seed color gene portions of the construct;
iv. crossing the excised first progeny provided in step ii) and the excised second progeny provided in step iii), thereby providing a third progeny comprising, in a first genome,
on a first chromosome of a pair of homologous chromosomes, at a single target locus, the at least one functional ectopic nuclease-null allele of a MF gene and the at least one functional ectopic allele of a seed color gene;
on a second chromosome of the pair of homologous chromosomes, at the target locus corresponding to the target locus of the first chromosome of the pair of homologous chromosomes, the at least one functional ectopic nuclease-null allele of a PV gene; and
v. mutating the endogenous MF genes at the native MF gene loci and the endogenous PV genes at the native PV gene loci to create loss-of-function alleles, optionally wherein the loss-of-function alleles are caused by contacting the genome with a site-specific guided nuclease and one or more guide RNA sequences or multi-guide constructs, thereby providing the male-fertile maintainer plant.

53.-59. (canceled)

60. A method of preparing a male-fertile maintainer plant for a male-sterile polyploid plant, the method comprising:
i. contacting a cell comprising a PV locus in a first chromosome and a second chromosome of a pair of homologous chromosomes in a first genome, with:
1. a site-specific guided nuclease;
2. one or more guide RNA sequences or multi-guide constructs specific to one or more sequences at the PV locus; and
3. an targeting insertion cassette comprising in 5′ to 3′ or 3′ to 5′ order: a first recognition site for a first recombinase and a second recognition site for the first recombinase;
thereby providing a targeting insertion plant;
ii. contacting the targeting insertion plant, or first progeny of the targeting insertion plant, or a cell thereof with the first recombinase and a cassette comprising in 5′ to 3′ or 3′ to 5′ order:
1) a first recombination site for the first recombinase;
2) at least one functional ectopic nuclease null allele of a MF gene and at least one functional ectopic allele of a seed color gene in either relative order; and
3) a second recombination site for the first recombinase;
thereby providing a cassette insertion plant;
iii. selecting a cassette insertion plant comprising a cassette insertion at one allele of the PV locus, or crossing a cassette insertion plant comprising a cassette insertion at both alleles of the PV locus with a plant with a functional PV allele at the PV locus,
thereby providing a cassette insertion plant with a cassette insertion at one PV allele in the first genome and a functional PV allele at the second PV allele in the first genome,
iv. contacting the cassette insertion plant selected in iii), or a first progeny or cell thereof, with:
1. a site-specific guided nuclease (e.g., CRISPR);
2. one or more guide RNA sequences or multi-guide constructs flanking the insertion sites, thereby excising the inserted recombination sites;
3. one or more guide RNA sequences or multi-guide constructs specific to the functional endogenous MF genes and/or flanking the functional endogenous MF genes, thereby mutating the functional endogenous MF genes at the functional native MF gene loci to create loss-of-function alleles;
thereby providing the male-fertile maintainer plant.

61.-112. (canceled)

113. A method of providing a male sterile plant seed, the method comprising selecting, from seed produced by selfing a plant of claim 8, seed not displaying a phenotype provided by the seed endosperm gene.

114. A method of providing male sterile plant seed, the method comprising selfing a plant of claim 8, whereby the resulting seed not displaying a phenotype provided by the seed endosperm gene is the male sterile plant seed.

115. A method of providing a F1 hybrid seed for crop production, the method comprising collecting the seed produced by a male-sterile plant pollinated by a male-fertile plant, wherein the male-sterile plant is
a) a plant grown from male sterile plant seed obtained by the method of claim 60; and/or
b) comprises:
i) loss-of-function alleles of an endogenous MF gene at each of the native MF gene loci;
ii) loss-of-function alleles of an endogenous PV gene at each of the native PV gene loci; and
iii) two ectopic alleles of the PV gene at a target locus.

116. A method of providing a F1 hybrid seed for crop production, the method comprising crossing a male-sterile plant with a male-fertile plant, wherein the male-sterile plant is
a) a plant grown from male sterile plant seed obtained by the method of claim 113; and/or
b) comprises:
i) loss-of-function alleles of an endogenous MF gene at each of the native MF gene loci;
ii) loss-of-function alleles of an endogenous PV gene at each of the native PV gene loci; and
iii) two ectopic alleles of the PV gene at a target locus.

117. A method of providing a F1 hybrid seed for crop production, the method comprising planting a male-sterile plant within pollination range of a male-fertile plant, wherein the male-sterile plant is
a) a plant grown from male sterile plant seed obtained by the method of claim 113; and/or
b) comprises:
i) loss-of-function alleles of an endogenous MF gene at each of the native MF gene loci;
ii) loss-of-function alleles of an endogenous PV gene at each of the native PV gene loci; and
iii) two ectopic alleles of the PV gene at a target locus; and
whereby the male-fertile plant pollinates the male-sterile plant and F1 hybrid seed is produced.

118. (canceled)

119. (canceled)

120. A method of producing a plant crop, the method comprising:
a. planting and/or harvesting a plant or portion thereof, wherein the plant:
i. is plant grown from F1 hybrid seed obtained by the method of claim 115; and/or
ii. comprises:
1) in each genome of the plant, at a native MF gene locus, one functional endogenous allele of the endogenous MF gene and one loss-of-function allele of the endogenous MF gene;
2) in each genome of the plant, at a native PV gene locus, one functional endogenous allele of the endogenous PV gene and one loss-of-function allele of the endogenous PV gene;
3) one ectopic allele of the PV gene at a target locus.

The application's sequence listing, which the Patent Office published only in electronic form, follows.

SEQUENCE LISTING (267 sequences)

SEQ ID NO: 1 - protein, 243 aa, Triticum aestivum
MVSADAARNVVGIIGNVISFGLFLSPTPVFWRIIKAKDVEEFKPDPYLATLLNCMLWVFYGLPIVHPNSILVVTINGIGLVIEGSYLIIFFLYSTNNKRLKMIGVLAAEAAFMVAVVLGVLLGAHTHEKRSMIVGILCVIFGTIMYASPLTIMGKVIKTKSVEYMPFTLSLVNFLNGCCWLAYALIKFDLYVTIPNGLGAFFGLMQLILYGCYYKRTPKEEKSVELPTSNPAGAGNVSVTVDR

SEQ ID NO: 2 - protein, 189 aa, Triticum aestivum
MLWVFYGLPIVHPNSILVVTINGIGLVIEGSYLIIFFLYSTNNKRLKMIGVLAAEAGFMVAVVLGVLLGAHTHEKRSMIVGILGVIFGTIMYASPLTIMGKVIKTKSVEYMPFTLSLVNFLNGCCWLAYALIKFDLYVTIPNGLGAFFGLMQLILYGCYYKRTPKEEKSVELPTSNPAGAGNVSVTVDR

SEQ ID NO: 3 - protein, 243 aa, Triticum aestivum; identical to SEQ ID NO: 1

SEQ ID NO: 4 - protein, 1709 aa, Triticum aestivum
MRWHTEVQEKKDIYAPFNILPLDAASASQSIMQLEEIKAAVAALRYTRGLTWPSAFEPERQKGGELDLLDWLRAMFGFQRDSVRNQREHLILLLANVHIRLEPKPEPLSKLDDRAVDVVMNKLFNNYKKWCKFLSRKHSLRNPPGAQLQEVQQRRILYLGLYLLIWGESANIRFMPECLCYIFHNMAYELHGLLAGNVSIVTGENIRPSYGGDEEAFLKKVVTPIYRVIRKEAGKSQHGKTAHSAWCNYDDLNEYFWTPDCFSLGWPMRDDGDFFKSVHDSRPVAVAGSSSPKGSSKGTGKTNFVETRSFWHIFRSFDRMWTFYLLALQAMLIFAWSEYSVTQILQKDLLYSLSSIFVTAAFLQFLQSILDFILNFPGHIRCKFIDVVRNILKIVVSAAWAVILPIFYISSQTKVNLPLKNLDRWFGYVKGVPQLYILAVAAYLIPNMISAMLFLFPMFRRWIESSDWHIVRLLLWWSQKRIYVGRGMHESQAALLKYTLFWILLLCAKLSFSYFVQIQPLIRPTKDIMSVHNIRYEWHEFFPNASYNIAAILSLWAPVLLVYLMDTQIWYAIFSTISGGNKGRNRRFSLVSPNKRTEAAKFAQLWNEVICSFRDEDFISDKEMDLLVVPYSSDPSLKLMQWPLFLLASKIPIALDMAAQFRPRDSDLWKRICADEYMKCAVIECYESFKLVLNLVVVGENEKRIIGIIIKEIEANIAKNTFLANFRMSALPVLCKKFVELVSTLKERDASKFDNVVLLLQDMLEVITRDMMVNEIKELAEFGHGNKDLVPRRQLFAGTGTKPAIVFPPPISAQWEEQIKRLYLLLTVKESAMDVPTNLEARRRISFFTNSLFMEMPRAPRVRKMLSFSVMTPYYSEETVYSRNDLDLENEDGVSIIFYLQKIFPDEWDNFMERIDCKRETEVWGNEENVLQLRHWASLRGQTLCRTVRGMMYYRKALKLQAFLDMASESEILEGYKAIADPAEEEKKSQRSLSSQLEAIADMKFTYVATCQIYGNQKQSGDRHATDILNLMVNYPGLRVAYIDEVEERDGEKVQKVFYSVLVKALDNHDQEIYRIKLPGPAKLGEGKPENQNHAIIFTRGEALQTIDMNQDNYLEEALKMRNLLEEFNENHGIRPPTILGVREHIFTGSVSSLAWFMSNQETSFVTIGQRVLANPLKVRFHYGHPDVFDRIFHITRGGISKASCGINLSEDIFAGFNSTLRRGNVTHHEYIQVGKGRDVGLNQISLFEAKVACGNGEQVLSRDIYRLGHRFDFFRMLSCYFTTVGFYVSSMMVVIIVYVFLYGRLYLALSGLEFAIMKQARMRGNRALEAAMGSQSIVQLGLLMALPMFMEIGLERGFRSALGDFIIMQLQLCAVFFTFSLGTKSHYFGRTILHGGAKYRATGRGFVVRHVKFAENYRMYSRSHFVKGLELMLLLVVYELYGDVATDSTAYVLLTSSMWFLVITWLFAPFLFNPSGFEWQKVVDDWDDWNKWISSRGGIGVPANKAWESWWEEEQEHLLSTGIIGRIWEIILSLRFFMFQYGIMYHLNISNGNKSISIYGLSWLVTVAVVLVLKVVSMGRKKFSADFQLMFRLLKLFLFIGSVGTLAILFTLLHLTVGDIFASFLAFAPTGWAILQISQASKPVVKAFGLWGSVKALSRGYEYLMGIVIFVPVAVLAWFPFVSEFQTRLLFNQAFSRGLQISRILAGG

SEQ ID NO: 5 - protein, 1906 aa, Triticum aestivum
MTAPRGGGDMPSSTASAAAAASTSEPNTPSSAHASGLNRRGSRGAAMASFSMEVFDNEVVPSSLSSIAPILRVAAEIEHERPRVAYLCRFYAFEKAHRLDQNSVGRGVRQFKTSLLQRLEKDNSPSLAKRLKKTDAREIESFYQEYYENYVRTLDKGEQADRTQLGKAYQTAGVLFEVLCAVNKNEKVEQVNPEIMRWHTEVQEKKDIYAPFNILPLDAASASQSIMQLEEIKAAVAALRYTRGLTWPSAFEPERQKGGELDLLDWLRAMFGFQRDSVRNQREHLILLLANVHIRLEPKPEPLSKLDDRAVDVVMNKLFNNYKKWCKFLSRKHSLRNPPGAQLQEVQQRRILYLGLYLLIWGESANIRFMPECLCYIFHNMAYELHGLLAGNVSIVTGENIRPSYGGDEEAFLKKVVTPIYRVIRKEAGKSQHGKTAHSAWCNYDDLNEYFWTPDCFSLGWPMRDDGDFFKSVHDSRPVAGSSSPKGSSKGTGKTNFVETRSFWHIFRSFDRMWTFYLLALQAMLIFAWSEYSVTQILQKDLLYSLSSIFVTAAFLQFLQSILDFILNFPGHIRCKFIDVVRNILKIVVSAAWAVILPIFYISSQTKVNLPLKNLDRWFGYVKGVPQLYILAVAVYLIPNMISATLFLFPMFRRWIESSDWHIVRLLLWWSQKRIYVGRGMHESQAALLKYTLFWILLLCAKLSFSYFVQIQPLIRPTKDIMSVHNIRYEWHEFFPNASYNIAAILSLWAPVLLVYLMDTQIWYAIFSTISGGMSGALGRLGEVSPNKRTEAAKFAQLWNEVICSFRDEDFISDKEMDLLVVPYSSDPSLKLMQWPLFLLASKIPIALDMAAQFRPRDSDLWRRICADEYMKCAVIECYESFKLVLNLVVVGENEKRIIGIIIKEIEANIAKNTFLANFRMSALPVLCKKFVELVSTLKERDASKFDNVVLLLQDMLEVITRDMMVNEIKELAEFGHGNKDLVPRRQLFAGTGTKPAIVFPPPISAQWEEQIKRLHLLLTVKESAMDVPTNLEARRRISFFTNSLFMEMPRAPRVRKMLSFSVMTPYYSEETVYSRNDLDLENEDGVSIIFYLQKIFPDEWDNFMERIDCKRETEVWGNEENVLQLRHWASLRGQTLCRTVRGMMYYRKALKLQAFLDMASESEILEGYKAIADPAEEEKKSQRSLSSQLEAIADMKFTYVATCQIYGNQKQSGDRHATDILNLMVNYPGLRVAYIDEVEERDGEKVQKVFYSVLVKALDNHDQEIYRIKLPGPAKLGEGKPENQNHAIIFTRGEALQTIDMNQDNYLEEALKMRNLLEEFNENHGIRPPTILGVREHIFTGSVSSLAWFMSNQETSFVTIGQRVLANPLKVRFHYGHPDVFDRIFHITRGGISKASCGINLSEDIFAGFNSTLRRGNVTHHEYIQVGKGRDVGLNQISLFEAKVACGNGEQVLSRDIYRLGHRFDFFRMLSCYFTTVGFYVSSMMVVIIVYVFLYGRLYLALSGLEFAIRKQARMRGNRALEAAMGSQSIVQLGLLMALPMFMEIGLERGFRSALGDFIIMQLQLCAVFFTFSLGTKSHYFGRTILHGGAKYRATGRGFVVRHVKFAENYRMYSRSHFVKGLELMLLLVVYELYGDVATDSTAYVLLTSSMWFLVITWLFAPFLFNPSGFEWQKVVDDWDDWNKWISSRGGIGVPANKAWESWWEEEQEHLLSTGIIGRIWEIILSLRFFMFQYGIMYHLNISNGNKSISIYGLSWLVIVAVVLILKVVSMGRKKFSADFQLMFRLLKLFLFIGSVGTLAILFTLLHLTVGDIFASFLAFVPTGWAILQISQASKPVVKALGLWGSVKALSRGYEYLMGIVIFVPVAVLAWFPFVSEFQTRLLFNQAFSRGLQISRILAGGKKQN

SEQ ID NO: 6 - protein, 1862 aa, Triticum aestivum
MASFSMEVFDNEVVPSSLSSIAPILRVAAEIEHERPRVAYLCRFYAFEKAHRLDQNSVGRGVRQFKTSLLQRLEKDNSPSLAKRLKKTDAREIESFYQEYYENYVRTLDKGEQADRTQLGKAYQTAGVLFEVLCAVNKNEKVEQVNPEIMRWHTEVQEKKDIYAPFNILPLDAASASQSIMQLEEIKAAVAALRYTRGLTWPSAFEPERQKGGELDLLDWLRAMFGFQRDSVRNQREHLILLLANVHIRLEPKPEPLSKLDDRAVDVVMNKLFNNYKKWCKFLSRKHSLRNPPGAQLQEVQQRRILYLGLYLLIWGESANIRFMPECLCYIFHNMAYELHGLLAGNVSIVTGENIRPSYGGDEEAFLKKVVTPIYRVIRKEAGKSQHGKTAHSAWCNYDDLNEYFWTPDCFSLGWPMRDDGDFFKSVHDSRPVAVAGSSSPKGSSKGTGKTNFVETRSFWHIFRSFDRMWTFYLLALQAMLIFAWSEYSVTQILQKDLLYSLSSIFVTAAFLQFLQSILDFILNFPGHIRCKFIDVVRNILKIVVSAAWAVILPIFYIRSQTKVNLPLKNLDRWFGYVKGVPQLYILAVAVYLIPNMISATLFLFPMFRRWIESSDWHIVRLLLWWSQKRIYVGRGMHESQAALLKYTLFWILLLCAKLSFSYFVQIQPLIRPTKDIMSVHNIRYEWHEFFPNASYNIAAILSLWAPVLLVYLMDTQIWYAIFSTISGGMSGALGRLGEVSPNKRTEAAKFAQLWNEVICSFRDEDFISDKEMDLLVVPYSSDPSLKLMQWPLFLLASKIPIALDMAAQFRPRDSDLWKRICADEYMKCAVIECYESFKLVLNLVVVGENEKRIIGIIIKEIEANIAKNTFLANFRMSALPVLCKKFVELVSTLKERDASKFDNVVLLLQDMLEVITRDMMVNEIKELAEFGHGNKDLVPRRQLFAGTGTKPAIVFPPPISAQWEEQIKRLYLLLTVKESAMDVPTNLEARRRISFFTNSLFMEMPRAPRVRKMLSFSVMTPYYSEETVYSRNDLDLENEDGVSIIFYLQKIFPDEWDNFMERIDCKKETEVWGNEENVLQLRHWASLRGQTLCRTVRGMMYYRKALKLQAFLDMASESEILEGYKAIADPAEEEKKSQRSLSSQLEAIADMKFTYVATCQIYGNQKQSGDRHATDILNLMVHYPGLRVAYIDEVEERDGEKVQKVFYSVLVKALDNHDQEIYRIKLPGPAKLGEGKPENQNHAIIFTRGEALQTIDMNQDNYLEEALKMRNLLEEFNENHGIRPPTILGVREHIFTGSVSSLAWFMSNQETSFVTIGQRVLANPLKVRFHYGHPDVFDRIFHITRGGISKASCGINLSEDIFAGFNSTLRRGNVTHHEYIQVGKGRDVGLNQISLFEAKVACGNGEQVLSRDIYRLGHRFDFFRMLSCYFTTVGFYVSSMMVVIIVYVFLYGRLYLALSGLEFAIMKQARMRGNRALEAAMGSQSIVQLGLLMALPMFMEIGLERGFRSALGDFIIMQLQLCAVFFTFSLGTKSHYFGRTILHGGAKYRATGRGFVVRHVKFAENYRMYSRSHFVKGLELMLLLVVYELYGDVATDSTAYVLLTSSMWFLVITWLFAPFLFNPSGFEWQKVVDDWDDWNKWISSRGGIGVPANKAWESWWEEEQEHLLSTGIIGRIWEIILSLRFFMFQYGIMYHLNISNGNKSISIYGLSWLVTVAVVLVLKVVSMGRKKFSADFQLMFRLLKLFLFIGSVGTLAILFTLLHLTVGDIFASFLAFAPTGWAILQISQASKPVVKAFGLWGSVKALSRGYEYLMGIVIFVPVAVLAWFPFVSEFQTRLLFNQAFSRGLQISRILAGGKKQN

SEQ ID NO: 7 - DNA, 732 bp, Triticum aestivum
  source 1..732: mol_type = unassigned DNA
atggtttccgctgacgcagctcgcaacgtcgtcggtatcatcgggaatgtcatctccttcggcctcttcctctcccctacgccggttttctggcggatcatcaaggccaaggacgtggaggagttcaagccggacccctacctggcgacgctgctcaactgcatgctctgggtcttctacggcctccccatcgtccaccccaacagcatcctcgtcgtcaccatcaatgggatcgggctcgtcatcgagggatcctacctcatcatcttcttcctctactccaccaacaacaagcggctgaagatgataggcgtgctcgccgccgaggcggcgttcatggtggccgtcgtgctaggcgtgctcctcggtgcccacacccacgagaagcgctccatgattgtcggcatcctctgcgtcatcttcggaaccatcatgtacgcctccccgctcaccatcatgggtaaggtgatcaagaccaagagtgtggagtacatgccattcaccctgtcgctggttaacttcctcaacggctgctgctggttggcctacgcgctcatcaagttcgacctctacgtcacgatccccaatggcctcggcgctttcttcggcctaatgcagctcatcctctacggctgctactacaagagaacccccaaggaggagaagagcgtcgagctgcccaccagcaaccccgccggagccggcaacgtctccgtcaccgtggacagataa

SEQ ID NO: 8 - DNA, 570 bp, Triticum aestivum
  source 1..570: mol_type = unassigned DNA
atgctctgggtcttctacggcctccccatcgtccatcccaacagcatcctcgtcgtcaccatcaacgggatcgggctcgtcatcgagggctcctacctcatcatcttcttcctctactccaccaacaacaagcggctgaagatgataggcgtgctcgccgccgaggcggggttcatggtggccgtcgtgctcggcgtgctcctcggtgcccacacccacgagaagcgctccatgatcgtcggcatcctcggcgtcatcttcggaaccatcatgtatgcctccccgctcaccatcatgggtaaggtgatcaagaccaagagtgtggagtatatgccattcaccctgtcgctggttaacttcctcaacggctgctgctggttagcctacgcgctcatcaagttcgacctctatgtcacgatccccaatggcctcggcgctttcttcggcctcatgcagctcatcctctacggctgctactacaagagaacccccaaggaggagaagagcgtcgagctgcccaccagcaaccccgccggagccggcaacgtctcggtcaccgtggacagataa

SEQ ID NO: 9 - DNA, 732 bp, Triticum aestivum
  source 1..732: mol_type = unassigned DNA
atggtgtccgccgacgcagctcgcaacgtcgtcggtatcatcgggaatgtcatctccttcggcctcttcctctcccctacgccggttttctggcggatcatcaaggccaaggacgtggaggagttcaagccggacccctacctggcgacgctgctcaactgcatgctctgggtcttctacggcctccccatcgtccaccccaacagcatcctcgtcgtcaccatcaacgggatcgggctcgtcatcgagggctcctacctcatcatcttcttcctctactccaccaacaacaagcggctgaagatgataggcgtgctcgccgccgaggcggcgttcatggtggccgtcgtgctcggcgtgctcctcggtgcccacacccacgagaagcgctccatgatcgtcggcatcctctgcgtcatcttcggaaccatcatgtatgcctccccgctcaccatcatgggtaaggtgatcaagaccaagagtgtggagtacatgccattcaccctgtcgctggttaacttcctcaacggctgctgctggttggcctacgcgctcatcaagttcgacctctacgtcacgatccccaatggcctcggcgctttcttcggcctcatgcagctcatcctctacggctgctactacaagagaacccccaaggaggagaagagcgtcgagctgcccaccagcaaccccgctggagccggcaacgtctcggtcaccgtggacagataa

SEQ ID NO: 10 - DNA, 5127 bp, Triticum aestivum
  source 1..5127: mol_type = unassigned DNA
atgcgctggcacactgaggtgcaagaaaagaaagacatctacgcaccgttcaatattctgcctctcgatgcggccagtgcatcccagtccatcatgcagctggaggagataaaagcagcagtcgcagctctgcggtacacacggggtttgacctggccttctgcatttgagccggaaaggcagaaggggggtgagctcgatttgctcgattggttgagagctatgtttggctttcagcgggacagtgtcaggaatcaacgggagcatttgattcttctcctcgctaatgtgcacattagacttgagccaaagcctgaaccacttagcaagctagatgaccgagctgttgatgtagtgatgaacaagttgttcaacaactacaagaagtggtgcaaatttttgtcacggaaacatagtttgagaaatcctccaggtgctcaattacaggaagttcagcaacgcagaattctgtacctaggtctttatcttcttatctggggcgaatcagcaaatatccggtttatgccagagtgtctttgctacatttttcacaatatggcatatgagttgcatgggttgcttgctggaaatgttagtattgtgactggtgaaaatatcaggccatcttatggtggggatgaggaggctttcttaaagaaagtggtcacacctatctatcgtgtcatcagaaaggaggcaggaaaaagccaacatggaaagactgcacattcagcatggtgtaattatgatgatctaaatgagtacttctggacacctgattgtttctcactgggatggccaatgcgagatgatggtgacttcttcaaatccgtgcacgattcaaggcctgtagcagtggctggaagctcctcaccaaagggttctagtaaaggcacaggcaagacaaattttgtagagacaagatcgttttggcacatctttcgtagttttgaccgaatgtggaccttctatctgttggctctacaggcaatgttgatttttgcttggagcgaatattcagtgactcaaatccttcagaaggacctcttatattctctatcaagcatatttgtcacagcagcatttttacagttcctccaaagtattttagactttattctgaactttcctggccacattagatgcaagttcattgacgtcgtgagaaatattctgaagatagtagttagtgccgcgtgggctgtgattcttcccattttctacatcagcagtcaaacaaaagtcaatttaccactgaaaaatctggacagatggtttggttatgtgaaaggagtgccacaactatatatcctggctgtggcggcgtacctgatacctaatatgattagtgcaatgctcttcctgtttccgatgtttcgaaggtggatagagagctcggattggcatattgttagactactactgtggtggtctcagaaacgaatttatgttggccgtggaatgcatgaaagtcaagctgctcttctgaagtacacattattttggattttgctgctatgtgcgaagctttccttcagttactttgtccagatacaacctcttataaggcctaccaaggatataatgagtgttcataacattcgttatgagtggcatgagttttttccaaacgcatcatataatatcgctgctatcctatccctctgggcccctgttctgttggtctatttgatggatacacagatatggtatgccattttctctacaatatccggcggtaacaaaggcagaaacagacgtttttcactcgtttcccccaacaagagaactgaagctgccaagtttgctcaactgtggaatgaagtgatttgcagtttccgcgacgaagattttataagtgataaggagatggacctattggtggttccatactcatcagacccgagcttaaaattgatgcagtggccgttgttcttgcttgctagcaagatacctatagctttagacatggcagcacaatttagaccaagagacagtgatttgtggaagcgtatatgtgcagacgagtatatgaagtgcgctgtaattgaatgctacgagtcattcaaacttgttcttaatttagtggtggttggagaaaatgaaaagaggattattggcattataatcaaagagattgaagctaacatcgcaaagaatacattccttgccaattttaggatgagcgcattgccagtcctttgcaagaagtttgtggagcttgtatccaccttgaaagaaagagacgcctcaaaatttgataatgtagtgctattgcttcaagacatgctggaagtgatcacgagggatatgatggtcaatgagatcaaagaactggctgaatttggtcatgggaacaaggatttagttccaagaagacaactttttgcgggcacaggcacaaaacctgcaattgttttcccaccaccaatttctgcgcagtgggaagaacaaattaagcgcttgtacctgcttttgactgttaaagaatcagcaatggatgtgcctacaaatcttgaagcccgccggagaatatcatttttcactaattcgctattcatggagatgccacgtgcgcctagagtgcgcaaaatgctctctttcagtgtaatgacaccatactacagtgaggaaactgtatattcaagaaacgaccttgatctggagaatgaggatggtgtatcaattatattctacctgcagaagatctttccagatgaatgggataatttcatggaaaggattgattgcaaaagagaaactgaagtttggggaaatgaagaaaatgttcttcaacttcgtcattgggcctctcttagagggcagacactctgtcgaacagtgagaggcatgatgtattacaggaaagctttgaagcttcaagcattcctagacatggcttctgaatctgagatactagaaggctataaagccattgcagatcccgcagaggaagagaagaaaagccaaagatctctgtcttctcagcttgaagctatagcagatatgaaattcacatatgttgctacgtgccagatctatggaaatcagaaacagtcgggtgatcgacacgcaacagatatactgaacttgatggtgaattatcctggtctccgcgtggcatacattgatgaagttgaagagagggatggtgagaaggtgcaaaaggtcttctattcggtgctagtaaaagctcttgacaatcacgatcaggaaatataccgcataaaattgccagggccagcgaaactaggtgaagggaaacctgaaaaccaaaatcacgcgatcatttttacccgcggagaagctttgcaaaccattgatatgaaccaggacaattatttggaggaagctttgaaaatgcggaatttgctggaagaattcaatgagaaccatggtattcgtcctccaacaattcttggagtacgtgaacacatattcaccggaagtgtgtcatctcttgcctggtttatgtcaaaccaggaaaccagctttgtcacaataggacagagggttcttgccaatccattgaaggtacgttttcactatggacatcctgatgtgtttgataggatttttcacattacaagaggtggaattagcaaggcttcctgtggtataaacttaagtgaagacatttttgctggtttcaactcaactctgaggcgaggaaatgtcacccatcacgagtacattcaagtcggaaaaggacgtgatgttgggttgaatcaaatttcactctttgaggccaaagtggcgtgtggcaatggagaacaagtgcttagcagagatatctaccgtttgggccaccgctttgacttcttccgaatgctctcatgttacttcacaactgtgggattttatgtcagctcaatgatggttgtcataatagtatatgttttcttgtatgggaggctttatttagccttaagtggacttgagtttgcaattatgaagcaagcacgaatgagaggcaaccgtgctcttgaggcagccatggggtcccaatctattgtgcagctaggtcttttgatggccttacccatgtttatggagatcggactggaaaggggttttagaagcgccctgggggatttcatcatcatgcagctacagctatgtgcagtattctttaccttttccctcgggacaaaatcacattattttggccgcacaatcctccatggtggtgcaaaatatagagcaactggcagaggctttgttgttcgccatgtaaagttcgctgaaaattacagaatgtatagcaggagtcactttgtgaaaggacttgagctcatgttactacttgtagtgtatgagctctatggtgatgtggctaccgattccactgcctatgttctgctgacatcatctatgtggttcttggtaatcacatggttgtttgctcctttcctcttcaacccatccggatttgaatggcaaaaggtggtggatgattgggatgattggaacaaatggataagcagccgtggtgggattggtgtgccggccaataaggcctgggagtcgtggtgggaagaggagcaggaacatctgctgtcaacaggcataatcggccgcatatgggaaatcatattatctctccgattcttcatgtttcagtatggtatcatgtaccatctgaatatctctaatggcaacaaaagcatatcaatttatggtctgtcttggctggtcactgtagcagtggtgttagtcctcaaggtggtatctatgggaagaaagaaatttagtgctgacttccagcttatgttccggctcctcaaattgttcttgttcattggatctgttggaactttggcgattcttttcacccttctgcaccttacagttggtgacatattcgccagcttccttgcctttgcacccacaggatgggccattctgcagatatcacaggcaagcaagccagtggtgaaggcttttggtctgtggggatctgtgaaggccttgtccagggggtacgagtaccttatggggatcgtgatcttcgtgccagtggcggttctggcatggttcccttttgtctcggagttccagacgaggctgctattcaaccaggcattctcccgaggcctccaaatctctcgcattttggctggcgga

SEQ ID NO: 11 - DNA, 5721 bp, Triticum aestivum
  source 1..5721: mol_type = unassigned DNA
atgacggcgccgcgcggtggcggggatatgccatcgtcgacggcgtcggccgccgccgccgcttcgacgtcggagcccaacacgccgtcgtcggcgcacgcgtcggggctcaaccggcgggggtcgaggggcgccgccatggcctccttctccatggaggtcttcgacaacgaggtggtgccgtcctccctcagcagcatcgcccccatcctgcgcgtcgccgccgagatcgagcacgagcgcccccgcgtcgcctacctctgtcggttctatgccttcgagaaggcgcacaggctggaccagaactccgttggccgtggcgtccggcagttcaaaacgtccctgcttcaacgattagagaaggataatagcccgagtctcgcaaagcgattgaagaaaactgatgcccgcgaaattgagagtttctatcaagaatactatgagaactatgtccgcaccctcgacaaaggggaacaagccgacaggactcaacttgggaaggcctaccaaacggctggagtcctcttcgaggtgctctgtgccgtcaacaagaatgagaaggttgagcaagttaaccccgagattatgcgctggcacactgaggtgcaagaaaagaaagacatctacgcaccgttcaatattctgcctctcgatgcggccagtgcatcccagtccatcatgcaactagaggagataaaagcagcagtcgcagctctgcggtacacacggggtttgacctggccttctgcatttgagccggaaaggcagaaggggggtgagctcgatttgctcgattggttgagagctatgtttggctttcagcgggacagtgtcaggaatcaacgggagcatttgattcttctcctcgctaatgtgcacattagacttgagccaaagcctgaaccacttagcaagctagatgaccgagctgttgatgtagtgatgaacaagttgttcaacaactacaagaagtggtgcaaatttttgtcacggaaacatagtttgagaaatcctccaggtgctcaattacaggaagttcagcaacgcagaattttgtacctaggtctttatcttcttatctggggcgaatcagcaaatatccggtttatgccagagtgtctttgctacatttttcacaatatggcatatgagttgcatgggttgcttgctggaaatgttagtattgtgactggtgaaaatatcaggccatcttatggtggggatgaggaggctttcttaaagaaagtggtcacacctatctatcgtgtcatcagaaaggaggcaggaaaaagccaacatggaaaaactgcacattcagcatggtgtaattatgatgatctaaatgagtacttctggacacctgattgtttctcactgggatggccaatgcgagatgatggcgacttcttcaaatccgtgcatgattcaaggcctgtagctggaagctcctcaccaaagggttctagtaaaggcacaggcaagacaaattttgtagagacaagatcgttttggcacatctttcgtagttttgaccgaatgtggaccttctatctgttggctctacaggcaatgttgatttttgcttggagtgaatactcagtgactcaaatccttcagaaggacctcttatattctctatcaagcatatttgtcacagcagcatttttacagttcctccaaagtattttagactttattctgaactttcctggccacattagatgcaagttcattgacgtcgtgagaaatattcttaagatagtagttagtgccgcgtgggctgtgattcttcccattttctacatcagcagtcaaacaaaagtcaatttaccactgaaaaatctggacagatggtttggttatgtgaaaggagtgccacaactatatatcctggctgtggcggtgtacctgatacctaatatgattagtgcaacgctcttcctgtttccgatgtttcgaaggtggatagagagctcggattggcatattgttagactgctactgtggtggtctcagaaacgaatttatgttggccgtggaatgcatgaaagtcaagctgctcttctgaagtacacattattttggattttgctgctatgcgcgaagctttccttcagttactttgtccagatacaacctcttataaggcctaccaaggatataatgagtgttcataacattcgttatgagtggcatgagttttttccaaacgcatcatataatatcgctgctatcctatccctctgggcccctgttctgttggtctatttgatggatacacagatatggtacgccattttctctacaatatccggcggtatgtctggggcacttggacgacttggggaggtttcccccaacaagagaactgaagctgcgaagtttgctcaactgtggaatgaagtgatttgcagtttccgcgacgaagattttataagtgataaggagatggacctattggtggttccatactcgtcagacccgagcctaaaattgatgcagtggccgttgttcttgcttgctagcaagatacctatagctttagacatggcagcacaatttagaccgagagacagtgatttgtggaggcgtatatgtgcagacgagtatatgaagtgcgctgtaattgaatgctacgagtcattcaaacttgttcttaatttagtggtggttggagaaaatgaaaaaaggattattggcattataatcaaagagattgaagctaacatcgcaaagaatacattcctcgccaattttaggatgagcgcattgccagtcctttgcaagaagtttgtggagcttgtatccaccttgaaagaaagagacgcctcaaaatttgataatgtagtgctattgcttcaagacatgctggaagtgatcacgagggatatgatggtcaatgagatcaaagaactagctgaatttggtcatgggaacaaggatttagttccaagaagacaactttttgcgggcacaggcacaaagcctgcaattgttttcccaccaccaatttctgcgcagtgggaagaacaaattaagcgcttgcaccttcttttgactgttaaagaatcagcaatggatgtgcctacaaatcttgaagcccgccggagaatatcatttttcactaattcgttgttcatggagatgccacgtgcgcctagagtgcgcaaaatgctctctttcagtgtaatgacaccatactacagtgaggaaactgtatattcaagaaacgacctggatctggagaatgaggatggtgtatcaattatattctacctgcagaagatctttccagatgaatgggataatttcatggaaaggattgattgcaaaagagaaactgaagtttggggaaatgaagaaaatgttcttcaacttcgtcattgggcctctcttagagggcagacactatgtcgaacagtgagaggcatgatgtattacaggaaagctttgaagcttcaagcattcctagacatggcttctgaatctgagatactagaaggctataaagccattgcagatcctgcagaggaagagaagaaaagccaaagatctctgtcttctcagcttgaagctatagcagatatgaaattcacatatgttgctacgtgccagatctatggaaatcagaaacagtcgggtgatcgacacgcaacagatattttgaacttgatggtgaattatcctggtctccgcgtggcatacattgatgaagttgaggagagggatggtgagaaggtgcaaaaggtcttctattcggtgctagtaaaagctcttgacaatcacgatcaggaaatataccgcataaaattgccagggccagcgaaattaggtgaagggaaacctgaaaaccaaaatcacgcgatcatttttacccgcggagaagctttgcaaaccattgatatgaaccaggacaattatttggaggaagctttgaaaatgcggaatttgctggaagaattcaatgagaaccatggtattcgtcctccaacaattcttggagtacgtgaacacatattcaccggaagtgtgtcatctcttgcctggtttatgtcaaaccaggaaaccagctttgtgacaataggacagagggttcttgccaatccattgaaggtacgttttcactatggacatcctgatgtgtttgataggatttttcacattacaagaggtggaattagcaaggcttcctgtggtataaacttaagtgaagacatttttgctggtttcaactcaactctgaggcgaggaaatgtcacccatcacgagtacattcaagtcggaaaaggacgtgatgttgggttgaatcaaatttcactctttgaggccaaagtagcgtgtggcaatggagaacaagtgcttagcagagatatctaccgtttgggccaccgctttgacttcttccgaatgctctcatgttacttcacaactgtgggattttatgtcagctcaatgatggttgtcataatagtatatgttttcttgtatgggaggctttatttagccttaagtggacttgagtttgcaattaggaagcaagcacgaatgagaggcaaccgtgctcttgaggcagccatggggtcccaatctattgtgcagctaggtcttttgatggccttacccatgtttatggagatcggactggaaaggggttttagaagcgccctgggggatttcatcatcatgcagctacagctatgtgcagtattctttaccttttccctcgggacaaaatcacattattttggccgcacaatcctccacggtggtgcaaaatatagagcaactggcagaggctttgttgttcgccatgtaaagttcgctgaaaattacagaatgtatagcaggagtcactttgtgaaaggacttgagctcatgttactacttgtagtgtatgagctctatggtgatgtggctaccgattccactgcctatgttctgctgacatcatctatgtggttcttggtaatcacatggttgtttgctccattcctcttcaacccatccggatttgaatggcaaaaggtggtggatgattgggatgattggaacaaatggataagcagccgtggcgggattggtgtgccggccaataaggcctgggagtcgtggtgggaagaggagcaggaacatctgctgtcaacaggcatcatcggccgcatatgggaaatcatattatctctccgattcttcatgtttcagtatggtatcatgtaccacctgaatatctctaatggcaacaaaagcatatcaatttatggtctgtcttggctggtcattgtagcagtagtgttgatcctcaaggtggtatctatgggaagaaagaaatttagtgctgacttccagcttatgttccggctcctcaagttgttcttgttcattggatctgttggaactttggcgattcttttcacccttctgcaccttacagttggtgacatattcgccagcttccttgcctttgtacccacaggatgggccattctgcagatatcacaggcaagcaagccagtggtgaaggctttagggctgtggggatctgtgaaggccttgtccagggggtacgagtaccttatggggatcgtgatcttcgtgccagtggcggttctggcatggttcccttttgtctcggagttccagacgaggctgctattcaaccaggcattctcccgaggcctccaaatctctcgcattttggctggcggaaagaagcagaactga

SEQ ID NO: 12 - DNA, 5589 bp, Triticum aestivum
  source 1..5589: mol_type = unassigned DNA
atggcctccttctccatggaggtcttcgacaacgaggtggtgccgtcctcgctcagcagcatcgcccccatcctgcgcgtcgccgccgagatcgagcacgagcgcccccgcgtcgcctacctctgtcggttctatgccttcgagaaggcgcacaggctggatcaaaactctgttggtcgtggcgtccggcagttcaaaacgtccctgcttcagcgcttagagaaggataatagcccgagtctcgcaaagcgattgaagaaaactgatgcccgcgaaattgagagtttctatcaagaatactatgagaactatgtccgcaccctcgacaaaggggaacaagccgacaggactcaacttgggaaggcctaccaaacggctggagtcctcttcgaggtgctctgtgccgtcaacaagaatgagaaggttgagcaagttaaccccgagattatgcgctggcacactgaggtgcaagaaaagaaagacatctacgcgccgttcaatattctgcctctcgatgcggccagtgcatcccagtccatcatgcagctggaggagataaaagcagcagtcgcagctctgcggtacacacggggtttgacctggccttctgcatttgagccggaaaggcagaaggggggtgagctcgatttgctcgattggttgagagctatgtttggctttcagcgggacagtgtcaggaatcaacgggagcatttgattcttctcctcgctaatgtgcacattagacttgagccaaagcctgaaccacttagcaagctagatgaccgagctgttgatgtagtgatgaacaagttgttcaacaactacaagaagtggtgcaaatttttgtcacggaaacatagtttgagaaatcctccaggtgctcaattacaggaagttcagcaacgcagaattttgtacctaggtctttatcttcttatctggggcgaatcagcaaatatccggtttatgccagagtgtctttgctacatttttcacaatatggcatatgagttgcatgggttgcttgctggaaatgttagtattgtgactggtgaaaatatcaggccatcttatggtggggatgaggaggctttcttaaagaaagtggtcacacctatctatcgtgtcatcagaaaggaggcaggaaaaagccaacatggaaaaactgcacattcagcatggtgtaattatgatgatctaaatgagtacttctggacacctgattgtttctcactgggatggccaatgcgagatgatggtgacttcttcaaatccgtgcacgattcaaggcctgtagcagtggctggaagctcctcaccaaagggttctagtaaaggcacaggcaagacaaattttgtagagacaagatcgttttggcacatctttcgtagttttgaccgaatgtggaccttctatttgttggctctacaggcaatgttgatttttgcttggagtgaatattcagtgactcaaatccttcagaaggacctcttatattctctatcaagcatatttgtcacagcagcatttttacagttcctccaaagtattttagactttattctgaactttcctggccacattagatgcaagttcattgacgtcgtgagaaatattctgaagatagtagttagtgccgcgtgggctgtgattcttcccattttctatatcagaagtcaaacaaaagtcaatttaccactgaaaaatctggacagatggtttggttatgtgaaaggagtgccacaactatatatcctggctgtggcggtgtacctgatacctaatatgattagtgcaacgctcttcctgtttccgatgtttcgaaggtggatagagagctcggattggcatattgttagactgctactgtggtggtctcagaaacgaatttatgttggccgtggaatgcatgaaagtcaagctgctcttctgaagtacacattattttggattttgctgctatgcgcgaagctttccttcagttactttgtccagatacaacctcttataaggcctaccaaggatataatgagtgttcataacattcgttatgagtggcatgagttttttccaaacgcatcatataatatcgctgctatcctatccctctgggcccctgttctgttggtctatttgatggatacacagatatggtatgccattttctctacaatatccggcggtatgtctggggcacttggacgacttggggaggtttcccccaacaagagaactgaagctgccaagtttgctcaactgtggaatgaagtgatttgcagtttccgcgacgaagattttataagtgataaggagatggacctattggtggttccatactcatcagacccgagcctaaaattgatgcagtggccgttgttcttgcttgctagcaagatacctatagctttagacatggcagcacaatttagaccgagagacagtgatttgtggaagcgtatatgtgctgacgagtatatgaagtgcgctgtaattgaatgctacgagtcattcaaacttgttcttaatttagtggtggttggagaaaatgaaaagaggattattgggattataatcaaagagattgaagctaacatcgcaaagaatacattccttgccaattttaggatgagcgcattgccagtcctttgcaagaagtttgtggagcttgtatccaccttgaaagaaagagacgcctcaaaatttgataatgtagtgctattgcttcaagacatgctggaagtgatcacgagggatatgatggtcaatgagatcaaagaactagctgaatttggtcatgggaacaaggatttagttccaagaagacaactttttgcgggcacaggcacaaaacctgcaattgttttcccaccaccaatttctgcgcagtgggaagaacaaattaagcgcttgtaccttcttttgactgttaaagaatcagcaatggatgtgcctacaaatcttgaagcccgccggagaatatcatttttcactaattcgctattcatggagatgccacgtgcgcctagagtgcgcaaaatgctctctttcagtgtaatgacaccatactacagtgaggaaactgtatattcaagaaacgaccttgatctggagaatgaggatggtgtatcaattatattctacctgcagaagatctttccagatgaatgggataatttcatggaaaggattgattgcaaaaaagaaactgaagtttggggaaatgaagaaaatgttcttcaacttcgtcattgggcctctcttagagggcagacactctgtcgaacagtgagaggcatgatgtattacaggaaagctttgaagcttcaagcattcctagacatggcttctgaatctgagatactagaaggctataaagccattgcagatcccgcagaggaagagaagaaaagccaaagatctctgtcttctcagcttgaagctatagcagacatgaaattcacatatgttgctacgtgccagatctatggaaatcagaaacagtcgggtgatcgacatgcaacagatatactgaacttgatggtgcattatcctggtctccgcgtggcatacattgatgaagttgaggagagggatggtgagaaggtgcaaaaggtcttctattcggtgctagtaaaagctcttgacaatcacgatcaggaaatataccgcataaaattgccagggccagcgaaattaggtgaagggaaacctgaaaaccaaaatcacgcgatcatttttacccgcggagaagctttgcaaaccattgatatgaaccaggacaattatttggaggaagctttgaaaatgcggaatttgctggaagaattcaatgagaaccatggtattcgtcctccaacaattcttggagtacgtgaacacatattcaccggaagtgtgtcatctcttgcctggtttatgtcaaaccaggaaaccagctttgtgacaataggacagagggttcttgccaatccattgaaggtacgttttcactatggacatcctgatgtgtttgataggatatttcacattacaagaggtggaattagcaaggcttcctgtggtataaacttgagtgaagacatttttgctggtttcaactcaactctgaggcgaggaaatgtcacccatcacgagtacattcaagtcggaaaaggacgtgatgttgggttgaatcaaatttcactctttgaggccaaagtggcgtgtggcaatggagaacaagtgcttagcagagatatctaccgtttgggccaccgctttgacttcttccgaatgctctcatgttacttcacaactgtgggattttatgtcagctcaatgatggttgtcataatagtatatgttttcttgtatgggaggctttatttagccttaagtggacttgagtttgcaattatgaagcaagcacgaatgagaggcaaccgtgctcttgaggcagccatggggtcccaatctattgtgcagctaggtctattgatggccttacccatgtttatggagatcggactggaaaggggttttagaagcgccctgggggatttcatcatcatgcagctacagctatgtgcagtattctttaccttttccctcgggacaaaatcacattattttggccgcacaatcctccacggtggtgcaaaatatagagcaactggcagaggctttgttgttcgccatgtaaagttcgctgaaaattacagaatgtatagcaggagtcactttgtgaaaggacttgagctcatgttactacttgtagtgtatgagctctatggtgatgtggcgacagattccacggcctatgttcttctgacatcatctatgtggttcttggtaatcacatggctgtttgctccattcctcttcaacccatcaggatttgaatggcaaaaggtggtggatgattgggatgattggaacaaatggataagcagccgtggcgggattggtgtgccggccaataaggcctgggagtcgtggtgggaagaggagcaggaacatctgctgtcaacaggcataatcggccgcatatgggaaatcatattatctctccgattcttcatgtttcagtacggtatcatgtaccatctgaatatctctaatggcaacaaaagcatatcaatttatggtctgtcttggctggtcactgtagcagtagtgttggtcctcaaggtggtatctatgggaagaaagaaatttagtgctgacttccagcttatgttccggctcctcaaattgttcttgttcattggatctgttggaactttggcgattcttttcacccttctgcaccttacagttggtgacatattcgccagcttccttgcctttgcacccacaggatgggccattctgcagatatcacaggcaagcaagccagtggtgaaggcttttggtctgtggggatctgtgaaggccttgtccagggggtacgagtaccttatggggatcgtgatcttcgtgccagtggcggttctggcatggttcccttttgtctcggagttccagacgaggctgctattcaaccaggcattctcccgaggcctccaaatctctcgcattttggctggcggaaagaagcaaaactga

SEQ ID NO: 13 - DNA, 14392 bp, Triticum aestivum
  misc_difference 3134..3234: note = a, c, t or g
  misc_difference 4118..4147: note = a, c, t or g
  misc_difference 4523..4623: note = a, c, t or g
  misc_difference 11828..11928: note = a, c, t or g
  misc_difference 13130..13198: note = a, c, t or g
  misc_difference 13418..13518: note = a, c, t or g
  source 1..14392: mol_type = unassigned DNA
cttgccgggggtctcgtggatttccttggcaaggatcttgacaaggatcgtcgtcttctggttctcatttgatcttgtgtatttatgatctccataaagatctacatgccaccacagaggcgcctcccgagccttggttccgatatggttgatggcgttgaaattccttggctcaagggtggcgcgctctgctggcattgggcaagttgccccggcaaggctcttgtcggggctgcggagactgcaccggcaatgctcttgccagggctgcagagactgcctcggcaagggtcttgccgggggagtccacttcgctcccttgctctttgtgtctccggtcttcgcgttgctttggttatcttgtgcttcggcttccctcctctgctctgctcagtgcgagcgcaggtgcggctctgactgcccgttgatacgtctccaacgtatctataatttttaattgctccatgctatattatctactgttttggacattattgaactttattatccacttttatattatttttgggactaacctattaaccggaggcccagcccataattgctgttttttgcctatttcagagtttcacagaaaaggaatatcaaacggagtccaaaccgaatgaaaccttcgggaacgtgattttctcaccgaacatgatccaggagacttggaccctacctcaagaaataaaggaggaagccacgaggtagggggcgcgcctacccctctcccccaggcgcgccctccactctcgtgggtccctctgttgctccaccgacgtactccttcctcctatatatacctatgtacccccaaacgatcaaatacggatcgagaaccctaattccaccgccgtaactttctgtatccacgaaatcccatcttggtgcctattccagagctccgccggagggggcatctatcacggagggcttctacatcaacatcatagcctctccgatgaagtgtgagtagtttacctcagaccttcgggtccatagttattagctagatggcttcttctctctttttggatcacaatacaatgtactccccctctcttgtggatatctattcgatgtattcttgtttttgtggtgtgtttgttgagaccgatgaattctgggtttatgatcaagattatctatgaacaatatttgaatcttctctggatttttttatgtatgattggttatctttgcaagtctcttcgaattaccagtttggtttggcctactagattgatctttcttgcaatgggagaagttcttagctttgggttcaatcttttggtgtcctttcccagttacagtaggggcagcaaggcacgtattgtattgttgccatcgaggataacaaggtgttttttttatcatattgcatgaatttatccctctacttcatgtcatcttgcttaaggcgttactttgttttcatgaatttaatactctagatgcatgctggatagcggtcgatgagtggagtaatagtagtagatgcaagcaggaatcggtctatttgtcttggacgtgatgcctatatacatgatcatacctagatattctcataactatgctcaattctatcaattgctcaacagtaattcgttcacccaccgtaaaatatatatgctcttgagagaagccactagttaaacctatggcccccgggtctatcttcatcatattaatcttccaatacttagttatttcctttcctttttactttgcttttattttacgttgcatctttatcacaaaaataccatgaatattatcctatcatatctcactctcgtaagtgaccgtgaagggattgacaacctcttaccgcgttggttgcgaggagttatttgttttgtgcaggtgcaagggactcgcgcgtagcctcctactggattgataccttggttctcaaaaactgagggaaatacttacgctactttgctgcatcatcctttcctcttcaaggaaatcgaacgcagtgctcaaggggtagcaaaaagaatttctagcgccgttgctggggaggttcgcacaagtcaagatttgactcccgacaatgagccatttctggcgccgttgccggggaatctacgcaaaagtcaacataccaagtacccactacaacccttatctcccgcattacattatttgccatttgcctctcgttttccactcccccacttcacccttgctgtttaattcgccctctccctctatcctccctctctttctctatttacctctttttgcccacttgctttttgtttacttgtgtgttggattgcttgcttgtcatgatggctcaagataacactaaattgtgtgactttaccaatgccaacaacaatgattttattagcactctgattgctcctcttagcgatgctgaatcttgtgaaattaatgccgctttgctgaatcttgtcatgaaagatccgttttccggccttcctagtgaagatgccgctacccatctaaatagcttcattgatttgtgtgatatgcaaaagaagaaatatgtggacaacaatattgttaagttgaagctatttcctttttcgcttagagattgtgctaaaacttggttttcgtctttgcctaaaaatagtatttattcttggaacaagtgcaaagatgtttttatctctaattattttcctcccgctaagatcatctcccttagaaacgatattatgaattttaagcaacttgatcatgaacatgttgcacaagcttgggcgaggatgaaattaatgatacgtaattgccctactcatggtttgaatttgttgatgattatacaaaaattttatgccagattgaattttgcttctagaaatcttttagattcggccgcgggaggcacttttacggaaatcagtttaggagaagctactaaactcctagataatattatggttaattattctcaatggcatattgaaagatctactaataaaaaggtgcatgcgatagaagaaattaatgttttgagtagaaagatggatgagcttatgaaattatttgctagtaagagtgtttcttatgatactaatgatatgcccttgtctactttgattgagaataataatgaatctatggatgtgaattttgttggtagnnnnnnnnnnnnnnnnnnnnnnnnnnnnnnnnnnnnnnnnnnnnnnnnnnnnnnnnnnnnnnnnnnnnnnnnnnnnnnnnnnnnnnnnnnnnnnnnnnnnntggtatgagatagtccttggttgatttatagaatgctctatgcacttcacttatatcttttgagtatggctttataggatgcttcatgcgcttcacttatatcatttaaagtttggattgcctgtttctctttacatagaaaaccgccatttgtagaatgctcttttgcttcacttatatatgttagagcgtgggcatatattttgtagaaagaattaaactctcttgcttcacttatatctatttagacagatgacaggaacatgtcattcacatggttagtcataaaatcctacataaaacttgtagatcattgaatatgatatgtttgattccttgcaatagttttgcgatataaagatggtgatattagagtcatgctagtgggtagttgtggattagtagaaatacttgcgttgaggtttgtgattcccgtagcatgcacgtatggtgaatcgttatgtaacaaagtcggagtatgaggtatttattgattgtcttccttattagtggcggtcggggacgagcgatggtattttcctaccaatctatccccctaggggcatgtgtagtagtacttttcttcgagggctaataaacttttgcaataagtatgtgagttctttatgactaatgttgattccatggattatacgcacgctcacccttccatcattgctagcctctctagtatcgcgcaactttcgccggtaccataaacccaccatataccttcctcaaaacagctaccatacctacctatcatggcatttccatagccattctgagatatattgccatgcaacttgcatcatcatcatatacatgacttgagcattcattgtcatattgctttgcatgatcgtaagatagctagcatgatnnnnnnnnnnnnnnnnnnnnnnnnnnnnnncattgctacgctagatcattgcacatcccggtacaccgccggaggcattcatatagagtcatatctttgttatagtatcgagttgtaagtaaataaaagtgtgctgatcatcattattagagcattgccccagtgaggaaaggatgatggagactatgattcccccagaagtcgggatgagactccagacaaaaaaataaaaaataaaaaaagagaaaggccaaaaaaaaggagaaggcccaaaaaaataaaaaaataaaaaaataaaaaatgagagaaaaagagagaaggggcaatgttactacccttttaccacacttgtgcttcaaagtagcaccatgttcttcatatagagagtctcttgagttatcacttnnnnnnnnnnnnnnnnnnnnnnnnnnnnnnnnnnnnnnnnnnnnnnnnnnnnnnnnnnnnnnnnnnnnnnnnnnnnnnnnnnnnnnnnnnnnnnnnnnnnnccgagtcaaaaccattgttgaccactgccacatcagctgcgggtgaagacaaaccggccagggtttttttgtgtgtccggttttggtttgtttagggggtggaagaagccgaaaataagatgaggaggtaaagtgaaccacccactttattcggggtagtaaaatggacttttttctttctcaaatacttgttcaatatttttcaaatatttgttcaatagttttatatacatgatcaacattttttgaaatacttgtcaacatttttcaaatacttgcccaacatgttcaaaatatttgttcaagatctttcaaatattttttgaagagtgttttgtgtaatatatatatttagaatattttagagtataaacaaaagaaaaataaaaggtgcggatggactaggcctctgacaaggataagtatccacacagcaaagaaaagtcttcttcctcctcccgtcggcgccgccgcggatccgccccgcctccgatggcatttgcctgtggaggagcggaggatcttggccccccgccggcgggagggaccctgttctcatttttgctagactgaacatcttggttggggctgtgtggcggcggcgatgtcccttggtagcaataatgtctcccacatcccatccccgtcccgatggtgcgaatagcgttgttgaaggatgtgtggaggtgtgtctccgtcggatctcatgggatttggtcggtgctggtctttgatggatttatttggatccagtttttgttcgtcttcgttcgtgtggtttcaggcttgatttttccgatctacaactcccttcatcggcgatggttgctgctctggtgtgctcgtcctttgggaccttagcacaatgacttcccaactgtctactacaacaaggtttgcgcggctccgatgatggaggggcgatgatggtggcgcgccattggctcgctccagtgcttgtagttgtcgctaggtggtccatagacctggttgtaatttttattacctcttgtgttctctgtactgccatgaatgatgaataaattggaaatttctctctcaaaaaaagaaagaaaaaaactaaaataaaaacgtgaaagaaacaaaacagaaaccaggctggtctttccagtgcgcgtgagccggcccaaccggggttccgttcagcatggggttcgctcctgtctcgcttacaatgccagacatagggcgcccttgagatcagggcaacttagagagagagatcaaggcttatccctcccgcccttttctctcggttagttaattagttttgactgagatcagttgcaacgataacttgggaagccgccgcgcctatatacgctccgcctccctctgccccgatcgcccattcgcccccaacccacaaccaacccttcctccttcctcaagcgcgtcagctcctccgccccggcgacccgagcgagatggtttccgctgacgcagctcgcaacgtcgtcggtatcatcgggaatgtcatctccttcggcctcttcctctcccctacgtaagcccccatcccccctcctctaatccgccgcctcttttgtagacagtctagagtaatctatattcatggatggtggttgttgcaggccggttttctggcggatcatcaaggccaaggacgtggaggagttcaagccggacccctacctggcgacgctgctcaactgcatgctctgggtcttctacggcctccccatcgtccaccccaacagcatcctcgtcgtcaccatcaatgggatcgggctcgtcatcgagggatcctacctcatcatcttcttcctctactccaccaacaacaagcgggtacgtactgccacatccctaaatctaatcccctcgcccgttgggtttcgtctagatagaacaagatctggccctaacccatgcccgtgcgtgtgtgcattcgtgcttgcagctgaagatgataggcgtgctcgccgccgaggcggcgttcatggtggccgtcgtgctaggcgtgctcctcggtgcccacacccacgagaagcgctccatgattgtcggcatcctctgcgtcatcttcggaaccatcatgtacgcctccccgctcaccatcatggtacgtacctacaccctccttcctcatgaatcgatcgtacgtgtgcatgcatgcactctttaatccatgctttaagcccttgatccgtttgctcttaattctggaggcgcagctgttattttatttcgtttcatttgttttgaactttgttagttgtgttttaatgcatgccgttctggtcgtatagagtgataatatgcatcgtttacaagacatgcgtggttaatctgcatgcatggatctactagctctttggcccaagtgtctttgagtggctagatgaatgcatgctgctcacctcacacagtagatgtactctccacacacaaattattttacgagacaagatgttgccttgtggacattttctgtattttgtggctagattcacgtaggggtctggcttcacacacccaagttatttcagaagatgcacaccgttcaatttacgtagatctacttcagacatccaagttatttcacaagatggtgttttgtgtgcacatgtttggtcaaaaaagctcaaaggtaacgcaacccctgcgtgtcctttccttgtggatctggacttgcatgccgtgtaaatagctatagccagccaaccaaactttctgttgcacccggccgccaaaatctcgtgttagctgttggagtgacgggtccgcaatcgcatggaagagccgttcatgacatgactaaaaacatgtgatccagcacttcatcacaaacgtatgtgccaatgccccgaggatgcatgcatggatatagtgcgtgcatgttctcttttgtttcttgtgatccttcactcttgccaaacctatgagttatgatgttaattaaccagtgagtttgtgtacctactcattatatttagatcaggaattcaatgagtcagccttgttaattacctacgtacgtacgtgtgctcttattacctggtgatgtaagtactactaagataagattgcaatacttgattgcagggtaaggtgatcaagaccaagagtgtggagtacatgccattcaccctgtcgctggttaacttcctcaacggctgctgctggttggcctacgcgctcatcaagttcgacctctacgtcacggtcagtacatgcatacatgcatacatgcatacatgcatacatgcatacatatacacatctcaaacaagtataccgattaaacctagctagctagatttttctgcctcatcgatctaactgccattcatgcatgcagatccccaatggcctcggcgctttcttcggcctaatgcagctcatcctctacggctgctactacaagagaacccccaaggaggagaagagcgtcgagctgcccaccagcaaccccgccggagccggcaacgtctccgtcaccgtggacagataagcattggcttgcagcagcagcagcagcaaactcgccgtcgccaagtgattctggtccggccggcggccgagattttagccctaaacattttgagtagttaaattccggatgatcgacgcttcaacaagtgtggtgtgctagtggtctttgttataattagctagtcttgatcgagtgtgcgtttcgtggtgtgccctcgtgcaacttagaactatattcgtgcatgggagcagacaggaacataatatatgtagctgagttgtcccgaataataattacaccacgcttgtcacgtatgtgtactctcgatcggaatctattcttacgcgatgatacaatatgtttatgaattatttctgcgaggctcagttgttaagaccgttcgttgttgtggaaccacatttttctaacgtctgcttcccttaacaccaccaccatgctgtcttgggaacgtgacggcaaccctgtcgctgagccacgataatctgtgaaaaacgacgtctacaagtaattttacagggatctcgtgttttttgttttagagaaaaagtgctacagccctgtccccatcttgtattaccaaaaacaagatttttttgcttgttggcattttttttgtgtgtgtacattttgtgcggatctcctgattttgtacttgaattttggttgtcattgctcatttagacagacaaataccgaatgcgtgtgacgctcctttagcgtttaagcacaaaaacctagattgccttttttttaacccccaaagcgtaaacaatagctctaaggtattttatattaacgtaaatcaacatcatagataaaaaaaactatccaatgcctattttttggtaacatatgaagtaggaatcattgtctcttaacaacatcatagatgcgttgcaatcagattctgaagactctcagcatacttcatattcactcgatgccccacaagagtcacataaaaaagaatttccaggcgttctcattttttaagaatctttccattcctaaggttccaaatattcaagcagcctaaaatgattatatccatggcaattcctctgaataactcaagagaagcaaaagtgctttcatcataggttaagatgcctctcttttcattctacgtaacctcataccaatattcttgtgcaaagatgaagtcccaaaacagatgtaagtaaaaccacacacacacacacacacacgcacgcacgcacgcacgcacgcacacacattcattacacttcagatagtattttcttttttcttttgagcatctttctgttattaactatatcatgaaagagcaaccagacgaagattttctttctgggcatgctaacactcttttgggccatttaaagataatttgagcatcgcgttgacctttcatcttgttgtacattttgatagaagagtatcttgctccaaaccaaggataaatccatttgcccatagcatggccactgaatttatgaagaataagatcctgaagctcattggaacgattgaatgtctgggtagctggagtctgaaaattgtctgctaactctcaaaggagtgcatctcagctaatgtgatatggtcatttgtaagcataggaatgtagttctggctaattttgcacagctcgagccaagagtcatgccataacaacacaaagtcactagatccaactacacatgatgacatcaagcaacttgcttgaatgttggtagatgtttaagatgagattttcaccaagatttttccccatggagaagatagacattccaagttgttataagagccctccagaggccccaaccgatggcgcaaactcaaaattattgatccttctagggcaaaaatttctcagatatgaactataaaaatatattctctcttagtttcctacaaacagtgaatggtacaccttcattcttcagttttgtttgttagagacaatcactcagcactattattaatacctctaatattccagttaagaatgttccaaagtccattgacgagaatatagattcaagattttctctaatataacaacatcatagaaactgcattaaactgagagtttgacaactctaagtgtcatctcttaacgatgcctacaactagaacaaatagagtacggaatatatatattctaatgtcgtgtatgtaaggaaagtgtccttccgcttccgagctcaaatgagctcggtgaagagtataatataaaaaattcaaaaaacattcaaacaatctgaattttttgtgacaagcactcacaaaagcttcaagtgcttgcaaaacttcgttatggaatcacattactttaaggtgtggcaaaaacaacaaaatcagtgcttcaaaatgcttttgaaagtagcacttttagagtatcgattttttttttgccacgccttctaggaatgtaatttcatgaggaacttttgcaagtacttgaaacccttgtcaatgtttctcacaaaaagatttcagatttttttactgttcaccgagctcatttgagctcgggctttgaaactctgtgtcgtgtatataacacattttttactgttcacatcagtttgattcacatcttcgcaaaggttcttgcactacggcttgctcctcggatgcgggaaatcgtttcaatgaaccagagcacattcatcgctggcagatgcgtgcacgataacttccttctcgtgcagcagacggcaaggctactccataacatcaaggcaccgcgcgttctcctcaagctcgacatcgcgaaagcattcgataccgttgcctggtccttcctgcttgagaccttgacccgccttggctttggccgtcgttggtgcgagtggatctccatcctgacatccacggcctccacgcgcgtcctaatcaacggcaaccccgggctgcctgtggatcatgcctgaggacttcgacaaggcgatcccatctcgcccatgctcttcgctattgtcatcgactcgctcaactcactgctacagcacgttgtttccgtaggcatcctgcagtggctcaccacccgtcatgccgcctcgagcatctctctctttgctgacgatgtcatcatcttctgtcaccccgacccccctgagcttgcctccatccgggagttgctacgtatctttggggatgcttccggcttgcgcaccaacttctctaagtgctccgctgtcgccatccaatgcggcaatgaggttgccgccgcgatcaccactgagctctcgtgtactgtcgccgccttccccatcacatacctcgggttgccgctatccatccgcaagtgtcacgcgtctactctcgtgcccctggtcgagcgactggccaagaaactagcaacttggaaggccactctcctttcatggggcgagcgactggccctggttagggatggcaattttatccatggatctggatacccatggatacccgacccggttgggcaagggtatgaagcacatttctgcccatggttccgtggatatggatacccacgaacagccggattgggcacggttatagtttgtgctccatggatatccaatggatacccgtacgtcatgtgaggccatatgccagtgatagtagaaagagcgaatcaatgggaaatggctggcaatatgcaactggtgccataagctatatgctgcagaatcaacctctagtatgtcacacttaaggactcatnnnnnnnnnnnnnnnnnnnnnnnnnnnnnnnnnnnnnnnnnnnnnnnnnnnnnnnnnnnnnnnnnnnnnnnnnnnnnnnnnnnnnnnnnnnnnnnnnnnnnaattattcatacatgaaaaatacataaaccaaacgtagtccaaacataaaatttgttcatcttgcataattgaaagataaaaaataaagttcagtgattttcaacgtggatccacatatgctatacaatatcattgagaagttgcatatgcacctattgaccctgaagttgttgatgcctatcaagaaagtttgcaatatgctccgcctcttgttccagacatgaactccgagcttctcaaaatcatgcatgcaggctgcgtcttcaccctcatcctcgccaataatgttgtgcaatattgcacaacatgtcataagctggcaaagtgtctccacttcccacatcattgcaactccacgaacaatacacctacgggcttggagcactttgaattccctctccacatccttcctagcaccttcttgcgcttgtgcaaaaagacattgtttcctaccatgaggaccagatagtcttcacaaacgccgcgcattgagaatagataccaccggcaagctagtacaccatgatatattttgtgcacattgatggtgtagctgcacgatggagcaacctcatcaccaggtctcttcaataaaggagatcattggagcacgttgatgtcattgttagaacctggcgtgccaaggaaagcatgccaaattcacaagtccttcgatgtcactgcttcaagtaaggtggtggcttctttggtgtggtcttggtactgcccatgcaaaccattgtggcagttcttgcattgcgagtgcatgtaatcaattgaaccgagcataactcaaaatcctctcgctgctccaactgccagtaacttttccatgccctccaaagttggttctctcatgtactctggtacaaacaccttcaccatagtgcatgcaaattccaccgtagtcttcaagcatgtgctctctcgcatcctaatttatgtatcaattccatatgcggccttaccatgcataagcatgcatcctaagagttgccgtgcatttttgcagaggaaagaatgaaagtttgccgcaacaatccttcctcggcttgaagttgtcatcagccttctccatggcagtcactacgcacaagaacaaagttctactcatctgaaagagatgtcgaaagaaaccttcatggtatgttgggtccagtgtgaagtagcccgtgtaaaaaagtcatgcactgtgaccttnnnnnnnnnnnnnnnnnnnnnnnnnnnnnnnnnnnnnnnnnnnnnnnnnnnnnnnnnnnnnnnnnnnnnatttcttcttggatgctcaccatcatcatcatttcaacatcttcatcatccgaatttaatgattcgatgaactcctttgtatatgaacttgtcaaggtctgtgtttctatagtcatcattcaacaatgaattcattggtgacctacaaatgactaaaagaacataaaaggtgctcggatatttcattgaatatatagagcgtgacgtgtatatctagagnnnnnnnnnnnnnnnnnnnnnnnnnnnnnnnnnnnnnnnnnnnnnnnnnnnnnnnnnnnnnnnnnnnnnnnnnnnnnnnnnnnnnnnnnnnnnnnnnnnnngctcaatggcacgtacacagaatataaaatgatttttatggagaaaaaggtagtccgctcactatatacaatggagcctacctgcctggtttgtcgctcttcagagtatctcacacaaggctgcggtggcctctctctctctctctcatcgttggtcactgatccggccacatcccgtccgccgggggaaagggagtgcggtggcctatctctctcaccattggtcactgatccggccgcatcccgtccgccgggggaaagggaggaagtgcatcgtttctccgttcgacggcgccgaggcagcacgtcccgatctgcggtacacgccgttctctctgaccaagctccgggcagcagggcctacgccaccttctggcagattccgcccgccgccgctcacctagttacatcccgacgacctctaggtatcccctccggccttgctccactgcccgtcttcccacgtcgctgcatgtagatcttccatagttctttgccaaaaatgtagctcgtccggcgtactttccatattgcagtctcgtcctcacaccgttttagacaaacacaaccgtggtgttatcttcccttaggacaaggaatatgcttcttttttgtcgtcgcatgtttcatcaactgttattggccagtaattgtttcatttctacctctttttttgcaaacagggccatccatttcaccttgttgttactgcgaccttttggtgaactgcacaaatcactttttgcttaagagtgttttgtgcagttgtactaaaatgtcacacgggcaacgtctctacatttcagtgcgactgcacaaagggagattggttttgctctatcctcctcatccaactccaagcctaatcttctcc

SEQ ID NO: 14 - DNA, 16953 bp, Triticum aestivum
  source 1..16953: mol_type = unassigned DNA
gtggtgccgtcctcgctcagcagtatcgcccccatcctgcgcgtcgccgccgagatcgagcccgagcgcccccgcgtcgcctacctctgtaagttcgttgcacttcgaagccgtctccgcgcgtgcctgttttgggagattttcgacaccttttcctggcacagcttggcgcatttggtgtctcggtcggacgaaacgggcaactcgtgatgatatgtttggcgattcacagccgttgtagtgtttatttgggaaggttttgtgctcacgaatctcggaaaatgcatgccgcgtgcgtcggttgttgttgtttttgtttctgggctgctttgattgttacgagtttattaaggggcatgtctgagatttctccgcgtatgatggttttgctgcgttagctggatcttcagctttgatatgtttctccttactcgtgaaactgatcttagaagtagctagcttctctcctgtatgctgcaccatgaggtcttcgtatatgatcgtatcgacgagatggcttgtgtttgagagcgcagattagatttagttgatgcaacttccagattccaacgttctccctcgattgtgttgcttttgcttgaatttgttctctatttaatactcgctggttatgtttaatcattaatttaggctaggatagtgctgcgcgatcagtttgcttggaaagttggaataccatatatcaggtagctcgtgttggttcttcggtgtctctatgtgagatttctccgcctatgtcgatctagctgtacatgctgcgctagattttggattttgtgtgttttctccttttttcagtagataattttgtgacaggtttgcttctgtatgcttgcattattcgtaccaaaccaaatcactcctgtttttcgaagtgcagagccgcagatttgattcatctgatggcttttctgacagttctccctagctcgttttgattgaatatgagtgctctctgtgttgtttgaatcatgtcagatatgacagttttgctccaccagcttttctctgaagaagtgcatatcacgtagcatgaatgggtgcttctggttcgcccttttttcgggatctcaccttgatctgttactctgtgaactaggtcggttctatgccttcgagaaggcgcacaggctggatcaaaactctgttggtcgtggcgttcggcagttcaaaacgtccctgcttcagcgcttagagaaggtgtgagacatctttctctgtctcttcccctccataatttctgcatgatctagctgacttggcgtacatgagggtttgttttgttagttgatacatgtcgacttgatcatgttccctcgctggttttgactgggtcactgtatctggccttcatagatatattatgcaagttgttgaattattattactaccatcttagctttttaactgcttgcaggatatataggtaatatatgagtttgtttggctaataagcctcatggagttaaaaataagctggaagctaatatggacaactctaccttaatttagttatcaaaatgtagtagtggtgcaagttatgttgtccaaatgctcagataaaccaaagggaaataggcaacatgcacatgcagtttaagccatgaaagtatttcctacttttcatttttgtgttgtaatatatatcttgcagatacacgatttttaacttgaagaatatggtcgctggatttagttcagtacacatttgtttcatgataagcttaccaactccatctccaaatacatgacgtagaaagcatgtagtcaaacctctctacctttgaccattaatcaaatcaaattatttagttttttggatagaaattataccattaattcagaacagtttcactatatatctttttacttatacatgttgttcattgaagactcaaaatgcaaaacattatctatcttagaacggtgggagtatatttgattattagtgataagttgataactgtcgatagtcaatctggaaattttattgtgattatcctaatttgatgaccatattgggagttgtgatcagccaagcaaacctacaagctcacttgatcctacctgatagataaagaacattgttccagtaatagaatgttgtgcttcgttctacttattttgtttcaaagtcacaactaaaccttcagttcagattcaacatttatttcgtgtttctgctggggaggggggtgaggtaaaatgacttcagattacaccatcctcctcatgattcgtctcaattgatcagtttgcagtgtagtcattcttgtttgttagagatataatgaggtagccacattctcatctgagcttattttttcagatgatccagttcaaatttaccactttgttgttcctacttgaaatggccagcgaatgtagtagaatggggaaaaaaagcaggggcttagggttcccttgttttcttaattcggattttgcctaacctactcttgaatccaaagatcctgccttaaaatttcccatttcgctcctacgcaatcgaacaggataatagcccgagtctcgcaaagcgattgaagaaaactgatgcccgcgaaattgagagtttctatcaagaatactatgagaattatgtccgcaccctcgacaaaggggaacaagcagacaggtaattcccaatccctaacctatactgcgatctcccctataagtccaatccctcgctatcacgaatccggtcccatgacattgttgcctccaggactcaacttgggaaggcctaccaaacggctggagtcctcttcgaggtgctctgtgccgtcaacaagaatgagaaggttgagcaagttaaccccgaggtttgtgctcactccagccaactgtcgtcgttctttctcagtagaaatatatgttccctctaatgcatcaagtttcttcaaatttcctctgcacagattatgcgctggcacactgaggtgcaagaaaagaaagacatctacgcaccgttcaatattctgcctctcgatgcggccagtgcatcccagtccatcatgcagctggaggaggtatacgactcacaacaatgcagcctatttcctcaaaacaggaacaattgcattatgtactggttcaattaaagaaactgacgtggtcaccgaatgcatcattaacagataaaagcagcagtcgcagctctgcggtacacacggggtttgacctggccttctgcatttgagccggaaaggcagaaggggggtgagctcgatttgctcgattggttgagagctatgtttggctttcaggtctgctacccacttcaggcaaaccaatttcgattggtccattgtattactataagctaacactagcttatcttcttgtgtgcagcgggacagtgtcaggaatcaacgggagcatttgattcttctcctcgctaatgtgcacattagacttgagccaaagcctgaaccacttagcaaggcacactcttctatcgatatttactttgacagcttgactttatgaatatcaatgtgataagcataagatcaatgggtcttgcatgcataaaaatgtggtggtagcttctgacagaacaggatatttgcctgagtttctaatatcttagaaaaaataaagttatttttcattggattagtaaccaattatttaccttcaatgttatgttgtgattgttggtgtaacttgccataacatacacatgcagtttaatttctttcttgatactactacttttgatttccatattcttgacattagaatttgctggactggtgccactactttcaaaaatgccagctgacttattggcattccgccacgaattcgattgattgaactttctgtatgcattattctcaagcaagtgcgtagctaaataatgttaattacacctccatttaccatgctttccttctctcctttttgttcatcgttgcttgatgattgatctcatccgttctttcacccctgaaacagctagatgaccgagctgttgatgtagtgatgaacaagttgttcaacaactacaagaagtggtgcaaatttttgtcacggaaacatagtttgaggtatataattccttaatcagtttcctctttatgtacattattgtgctgataatcttgcaactgcagaaatcctccaggtgctcaattacaggaagttcagcaacgcagaattctgtacctaggtctttatcttcttatctggggcgaatcagcaaatatccggtttatgccagagtgtctttgctacatttttcacaatgtaatttgcacattctttattatcatatcaagtaccaaatctcattgcaaaaatatatctttgaatgattcttctcaatgtgttcagatggcatatgagttgcatgggttgcttgctggaaatgttagtattgtgactggtgaaaatatcaggccatcttatggtggggatgaggaggctttcttaaagaaagtggtcacacctatctatcgtgtcatcagaaaggtactttgataaattaccattacctgaaattccaagttagtttgttctgaatataattgtggtggtttttcaggaggcaggaaaaagccaacatggaaagactgcacattcagcatggtgtaattatgatgatctaaatgagtacttctggtctgtttacagccctattttctggtcacatgccgacagccttttcacacattctctgatagatcctactctgtttcaggacacctgattgtttctcactgggatggccaatgcgagatgatggtgacttcttcaaatccgtgcacgattcaaggcctgtagcagtggtacagttcgatatcagtctgtcagtatctcttccaaagactttgattaggaggagaatactgacaaataactatttgtaggctggaagctcctcaccaaagggttctagtaaaggcacaggcaagacaaattttgtagagacaagatcgttttggcacatctttcgtagttttgaccgaatgtggaccttctatctgttggctctacaggtactgtgccgaatttttcaatgggcttttttctctgtactatggtttttgatggtttgacactgtgaatcttgtaatttttaaaccaaacaggcaatgttgatttttgcttggagcgaatattcagtgactcaaatccttcagaaggacctcttatattctctatcaagcatatttgtcacagcagcatttttacagttcctccaaagtatgtttcccatttcaaatacttgttttatatacaaggcatttttctgatgcatgtaatatttccttttattttttgagaacctgaaatttttagtatgacaagtgatgaatattggcataatttagttccctttatgtatgtactaccttctgcttttgtcaatggcattacggtaagactatgttaagctaggttcccgcgatacagagcactttcacagcagaaagcaactggcaagaacattcatgtagatatctgcaactttaggatctcttctcatatgcattaaactagtgttactataccgagcagtcatgttcttgagatgctccccggtctggaattcttgtggtcttaagagggttctggtgcaataacaaattcgtcatccaaactgaaactgatattttctttaattttgatggcaggtattttagactttattctgaactttcctggccacattagatgcaagttcattgacgtcgtgagaaatattctgaagatagtagttagtgccgcgtgggctgtgattcttcccattttctacatcagcagtcaaacaaaagtcaatttaccactgaaaaatctggacagatggtttggttatgtgaaaggagtgccacaactatatatcctggctgtggcggcgtacctgatacctaatatgattagtgcaatgctcttcctgtttccgatgtttcgaaggtggatagagagctcggattggcatattgttagactactactgtggtggtctcaggtattcaatttaatctattttatttgtttgtgttatattatgtggaaaatcacttatgctgcttatcctcattgtaagtattcatttcaaaatttctgctatgaggcaatttttaataaggtaatatttgataaaatggaactgtattttgtagaatgaatttgtcttgatatccttgccagcttattgtttgtcatagtatcctagagggttgagaaactactgataaaattgtaaattgtaacttgcaagaagagaaaataatccaatgacttctgatgccagggcagagattatcctgctattttgtcattagtttgaaaaaaacacattttagttaaaaagttctcacatgcttgtgaaaattgatagttttcacttctctaacaatatgtgttcatggtagaatggcgcgtagccctagggcccctgctctggcccaaagaggattgtaccaaactccttttcaatacaatgaaacacaaagcttttgcgttttctcgaaaaaaaacaatatgtgttcaactgaacacatttgctatcccagtaatgaaaatgatattgcaagggtacatatggacgaaacagggtggaaaacgtgaaggcaatagattattttgtatgcaatgcgtggaagtaaaataactggatgaatttccctggatcataaggcgctgtacatttattcgtttttcatatttctttcctgtgcggcttgctgtacacgctaattgtataaataactgcagaaacgaatttatgttggccgtggaatgcatgaaagtcaagctgctcttctgaagtaagttactctgttctatttttcttctattagagctttattctgcagaaaaaactcaattctcttctattcaactgagaaggtacacattattttggattttgctgctatgtgcgaagctttccttcagttactttgtccaggtaagttctatgcttagttatttgcaaacatgctttgacgagattgatctgaaacagtttaatttgcagatacaacctcttataaggcctaccaaggatataatgagtgttcataacattcgttatgagtggcatgagttttttccaaacggtaattccaatgcttttttttggtgccgccttcattctggaaccctttttttactgataattcgttgccttttcagcatcatataatatcgctgctatcctatccctctgggcccctgttctgttggtatgcatttatccagcctgctagtgtagtgcctatccagcttatgtattagctgattgtttcgaaactgcattctaaatcttggtttatcaactacaatgcttttattcttgtaggtctatttgatggatacacagatatggtatgccattttctctacaatatccggcggtatgtctggggcacttggacgacttggggaggtaatgataaatctgaactattctctgtaatctgttgttttgctttatactccctccgttcctaaatacttgtctttctagtcatttcaacaagtgactacatacggagcaaaatgagtgaatctacactctaaaatatgtctacatacatccgtatgtagtagtcatttgaaatgtctagaaagacaaatatttaggaacggagggagtagtttagaacttataatgaccataagtgtagggcgccccaagattgatggatagttaaggggctttttctttatattgaggagtaaactgaacgtgtcgaggtctcggtcaattgcatgaaccaaatagctcgtactttataaacataatggcaggccatgtagatggtaatacagttttatgcagaatattttgtttgaggaagcttagcgaggtattttaataagtggaaatcaccttttttttgtttttgcagcctgagaattcagaataaactacattagattataatggtaattttaagtagataaatatggaagtgtattcacaaggcaaatgggatatttagttttaggaggatcctctgggagtcgcacttcagtcttgtttctgttatgctgccgtatttacaagaaaaccttttccaaattcatgaaatgaagcaaaaaatgtattgctggtggcttggtgcatttatagtcggatattctcctttttaaccgtcgacatttttgtattagcactgccttttttactttgttattgccctacagcgttgtgtaactttttctttttgcgagagttaagaagctgaacttcatactgttctggtttctgatggagttgctacactcttgtaccagattcgaacactaggaatgctgagatcacgatttcactctttgcctggagccttcaatacatatttggtgccatcagacaaaggcagaaacagacgtttttcactcgcaaagcgcttcgcagaggtaccaaatgacaataacgaaaattattgtcaagatttcacttataaccccccttaaaagttatgatataatgaagaatttaaagtacaggtttcccccaacaagagaactgaagctgccaagtttgctcaactgtggaatgaagtgatttgcagtttccgcgacgaagattttataagtgataagtgaggcccttagatcatgttcacctagaaaacattatcattgcaatgcagataatggaccttctgttatgcagggagatggacctattggtggttccatactcatcagacccgagcttaaaattgatgcagtggccgttgttcttgcttgctagcaaggtttgacagaacaaatttaatatgtccactctaccttgttacatgtttgtgttcggctcttactggaaatcattttgattgaaatttgcagatacctatagctttagacatggcagcacaatttagaccaagagacagtgatttgtggaagcgtatatgtgcagacgagtatatgaagtgcgctgtaattgaatgctacgagtcattcaaacttgttcttaatttagtggtggttggagaaaatgaaaagaggtatcttcatatacttccatttttcacactgtttcacgtatctctatgtgagaaagacattgatgttgtttgtcatagcttttaggtattcagttaatgataacactaggaaataaataattacatccggaacagacattgtgcactatttttcttcaaaaaaatcgttactagtacctagtaggttataatttctatgattgtctaaggctcctctgttgacgaatccttgccacttttgagcaagacagggccacccaggaaatcatttgtttcgttccaatatgataaaatcattcttaccataaactgggaaacacgcagatcaggacaagtatttttgaacatataaagtggtcagacatggctgaatatttgtagtttgaacatgcacgttttcattcgtagtagtgatgccaaaaatcaatacaaatatattactaaaaatctacaaccctatatgataatggggtttgagagttcaagattacaaatccattacttttaccaataaatatatatctggctagttgcgtatggcggcacatcatcactttcaaacttaagaatcaagatattccaaattgaactagggagaaggactgccaagcacctctatggtgcaatatgcatggaagggaaaccatgattagttgtaactgctaaatgtgcaacgtgtgttagataggcagccttagtactattgaaggcatctgtgtcaatctttcatgtttgttggtttttttactgcattgttcttcatcattgcatgctcactgttatcttgatcttctactgacatgtttgttcactaacttcaacaggattattggcattataatcaaagagattgaagctaacatcgcaaagaatacattccttgccaattttaggatgagcgcattgccagtcctttgcaagaagtttgtggagcttgtatccaccttggtaagcaatgttgttacctctactgaacaccaaccctattgaagattgcattgcttgatatttttttagacaagtaacacgttcgattattgctacaattatctgatcacatctgcagaaagaaagagacgcctcaaaatttgataatgtagtgctattgcttcaagacatgctggaagtgatcacgagggatatgatggtcaatgagatcaagtaataccttctgcaccaatttataatcatacatgtgccttgtcatagaaattggtgactattttttttaacatgtgttgtttacagagaactggctgaatttggtcatgggaacaaggatttagttccaagaagacaactttttgcgggcacaggcacaaaacctgcaattgttttcccaccaccaatttctgcgcagtgggaagaacaagtaataacatcatattcttatttggcttttgtaacaaagaaggttcgctaacttcacctatctacagattaagcgcttgtacctgcttttgactgttaaagaatcagcaatggatgtgcctacaaatcttgaagcccgccggagaatatcatttttcactaattcgctattcatggagatgccacgtgcgcctagagtgcgcaaaatgctctctttcaggtttgtctcgtatgtaaactttcaacatatcacagtatcgtccacttatctaaatataccgcagtatcgaaaatcataatgtctagctaaattagctggattctttggagcctggcagctactggctaatggtccttttactgtgcttcttaaaaagaattatatctgcttgtcaagaaatattttgggctgaattatggtatgttcttaactctgatcagtttgaaagaatagaaaacgtgaatatttttgggcgtggaattgtgaatttgtgctagtcaggaaagaggaaagcaccattaataccaaggagaagcttatcaatgttgggattttaactgaaattattgctgtttgatgaactcgtattctgaactaaatggcggggtggtttctaattttcacggtcagttgtttaggattatttttatgataggttgttattttgatcactgccatcctcatcgtagtctcaaaaaacttcttgctgtcatttgatgtgttgtttaagctaaaaatggaagtattgagtgtcttgagttgcttttgaaactgtctttgagtctgtcactctcattgtctcagcagatttgcatgccccttttcggtattaactacagagtcggagttttgtgtcttgaccagttaacccagtggcgccattatcatactagaaccgaagttcatctacagttttgatcagaattcatttaaagttgcattatattacaactgattctgtactcatcagctcatgttcacttgatggtaaacaaaatttataaacagaagcgttgaacatccacaatgtctggcagtggcactctgtaatcttgttacaagtacatctgtttccaccttaaaggaaacatgcacctagatattctaaaaaaagaacaagtggtgaacttccaagtggagacctgtacaacagaatgtgtgccacccatctttaagtgcattcataatcaaatcaacaacgtcaacaccagaaatatattatcagttcacaacaacaaatatctgataaaccgtatgtttaaatttgttctgtgatcatgagagtttcagcgaaaaagattgggctctagatgattcatatgacacttgttcttcacagtgtaatgacaccatactacagtgaggaaactgtatattcaagaaacgaccttgatctggagaatgaggatggtgtatcaattatattctacctgcagaagatctttccaggttcctttcctgtttgatgtgttttaatgcctacagttctttatgaatttgattgccagccttttgtcttctattcttgataattcttgttatatagatgaatgggataatttcatggaaaggattgattgcaaaagagaaactgaagtttggggaaatgaagaaaatgttcttcaacttcgtcattgggcctctcttagagggcagacactctgtcgaacaggtacttcggccatacccttcaatcttgtcaaatatggatcatttagctgattccgtgtttacatgtttttcttattgcgaatagtgagaggcatgatgtattacaggaaagctttgaagcttcaagcattcctagacatggcttctgaatctggtgagcttcttcaacttccaattcgagcattcctagacatgatgtattgagcattcctagacatgatgtatttagcattcctagacatgttcacaaatataagatgttttggatctttcaatatggactacatgtggactgaaatgagtgaacaaacacactaagcttctatcaataaagttagaacatcttatatttgtgaacggagagggtaccttttacaaatacttcctgattttatattgtagaactaggggagcatccgcaataggtgcaaaaagggggatcttaggaatattttgagagagatgaatagttttttttcatgtaggtagcatcaagagaagagaactaggtctacatattgtagcatctttttagaagttagacccaatcttattggacacttggaaggatacactgaggatgttcttaggaacccccccccccccccccctgtataacaaactcaaactgggcttacaggggacttatacaaagtgtccaacatcaccctcttttgtttgcagagatactagaaggctataaagccattgcagatcccgcagaggaagagaagaaaagccaaagatctctgtcttctcagcttgaagctatagcagatatgaaattcacatatgttgctacgtgccagatctatggaaatcagaaacagtcgggtgatcgacacgcaacagatatactgaacttgatggtgaagtaagtgatctcgatgatctattctagaaattaatatacaacatttggccaagcgcgagatacatcatgtctaccacaatgagcaaaatgttttcttgtataactctttggagactgtgtgtctcggttatgtttatatttagttcacatttaattgataacgagatgttccttgagggaaaattactgaattgtttcttttattcgaattgttatttccctctgtgcaaagtaatttcagttagaatttgaaatgaaactacagttatcctggtctccgcgtggcatacattgatgaagttgaagagagggatggtgagaaggtgcaaaaggtcttctattcggtgctagtaaaagctcttgacaatcacgatcaggtaatcattttacgtgaagcgagttcaaactttcattttggttctgatttaaacctcaatactcagtagtgtgttatgtacttttttgtcctgtgaaggaaatataccgcataaaattgccagggccagcgaaactaggtgaagggaaacctgaaaaccaaaatcacgcgatcatttttacccgcggagaagctttgcaaaccattgatatgaaccaggtgaacttcatggttatagtacgtttttagtaagtaggttgcattctgtcttttgtacttatcaatgctgtttaggacaattatttggaggaagctttgaaaatgcggaatttgctggaagaattcaatgagaaccatggtattcgtcctccaacaattcttggagtacgtgaacacatattcaccggaaggtgtgttttaagctttgcagtaggttttacttagttttctttgtcaaaattgcaaagcaatgcctaacatctgacattgctggattgtagtgtgtcatctcttgcctggtttatgtcaaaccaggaaaccagctttgtcacaataggacagagggttcttgccaatccattgaagtaagtctgaatatactttgatgtgtcctatttgaattaagcacaatccatatttatcatatggagcattttgtgtcatttatatgctgcaatatgagtagggagtgctgagcatctatggtgactatctcctggatgagcgcttatgtttttttatcagctcttgaaatgcacacacatgttttgttggagattttagaggcaataaggccataaatattaaaacaaccaagtgctatttcctggaactttcctggcatcaaatcttttgaagctaaacaatgtcatcaatttaaagtgtatattgtggtccaagtgctgtatatctgacatgctatttcctgaaactttcctggcatcaaagcttttcaagctaaacaacgtcgccaatttaaagggtgtattattgttattgtgtatgtgctgtatatctgacatgctgtttcctgtcagtaaagcttttcgagctaaaaaatgtcgtcaatttaaaatgtgtattatatctaatctaagtgattaatatctgacatgctgcttcctgaaactttcctggcatcagagcttttcaagctaaacaatgttgttaatttgaagtgtgtggtatggtcattggtcattgctatgtatctgacattctcttttctgggcagggtacgttttcactatggacatcctgatgtgtttgataggatttttcacattacaagaggtggaattagcaaggcttcctgtggtataaacttaagtgaagacatttttgctggtatgtacttttccacctattctaactgttacctttggatttttgagggaaatttaagaatggataggtccctaggacatccacatcctcgtatatgtgactcaaactgggtttgacaactgattcacacatgggcctatatgggcctcagacagactactctaaacttgattaagacactgatgctactcttatctaacacattaactcacattccaacatttcccatttctgctcttggacaagacaaacttaaattttctttttcaggtttcaactcaactctgaggcgaggaaatgtcacccatcacgagtacattcaagtcggaaaaggacgtgatgttgggttgaatcaaatttcactctttgaggccaaagtggcgtgtggcaatggagaacaagtgcttagcagagatatctaccgtttgggccaccgctttgacttcttccgaatgctctcatgttacttcacaactgtgggattttatgtcagctcaatggtacaaaacatctacctgcatcacatttgtcttgatttgccatcgtccatgttttttgatgttcttatattactgtgcagatggttgtcataatagtatatgttttcttgtatgggaggctttatttagccttaagtggacttgagtttgcaattatgaagcaagcacgaatgagaggcaaccgtgctcttgaggcagccatggggtcccaatctattgtgcagctaggtcttttgatggccttacccatgtttatggagatcggactggaaaggggttttagaagcgccctgggggatttcatcatcatgcagctacagctatgtgcagtattctttaccttttccctcgggacaaaatcacattattttggccgcacaatcctccatggtggtgcaaaatatagagcaactggcagaggctttgttgttcgccatgtaaagttcgctgaaaattacagaatgtatagcaggagtcactttgtgaaaggacttgagctcatgttactacttgtagtgtatgagctctatggtgatgtggctaccgattccactgcctatgttctgctgacatcatctatgtggttcttggtaatcacatggttgtttgctcctttcctcttcaacccatccggatttgaatggcaaaaggtggtggatgattgggatgattggaacaaatggataagcagccgtggtgggattggtgtgccggccaataaggcctgggagtcgtggtgggaagaggagcaggaacatctgctgtcaacaggcataatcggccgcatatgggaaatcatattatctctccgattcttcatgtttcagtatggtatcatgtaccatctgaatatctctaatggcaacaaaagcatatcagtaagtcatcctttatttttgctagtattttacaactctactcgaactaaatggatttcatgagactgattacatgatctttttgattgtttataatcactgtttactgatacaatttagtgactgtcccttccaaacttgattttgtggcttcagatttatggtctgtcttggctggtcactgtagcagtggtgttagtcctcaaggtaaatttcatttgctttctgttgatgaaatcaataagtatatattggttgacgtatgcctctagtttatgcccttgttatgctgctgatatggtgccatttacttaggtggtatctatgggaagaaagaaatttagtgctgacttccagcttatgttccggctcctcaaattgttcttgttcattggatctgttggaactttggcgattcttttcacccttctgcaccttacagttggtgacatattcgccagcttccttgcctttgcacccacaggatgggccattctgcaggtacgtcatcagcaccaaagctttcctgttgttttgtttcaaggttttactcccagcttatcagtagcgaggactgagtgaggagcagtatcaattcatagggagagagaaacgagagaattttgatcgagttaaagttgctattatcaaaattgacatctttcactggctctaatccgttcggcatcattgcaacagatatcacaggcaagcaagccagtggtgaaggcttttggtctgtggggatctgtgaaggccttgtccagggggtacgagtaccttatggggatcgtgatcttcgtgccagtggcggttctggcatggttcccttttgtctcggagttccagacgaggctgctattcaaccaggcattctcccgaggcctccaaatctctcgcattttggctggcggaaagaagcaaaactga

SEQ ID NO: 15 - DNA, 4560 bp, Triticum aestivum
  source 1..4560: mol_type = unassigned DNA
ctgtttccggtcaataaccaatagtggaacctggatgttcatattggctcctacatattctacgaagatctttatcggtcaaaccgcataacaacatacgttgttccctttgtcatcggtatgttacttgcccgagattcgatcgtcggtatccaatacctagttcaatctcgttactgacaagtctctttactcgttccgtaatacatcatcccgtaactaactcattagttacaatgcttgcaaggcttaagtgatgtgtattaccaagagggcccagagatacctctccgacaattggagtgacagaacctaatctcgaaatacgccaacccaacatgtaccttcggagacacctgtagagcatctttataatcacccagttacgttgtgacgtttggtagcacacaaagtgttcctccggtaaacgggagttgcataatctcatagtcataggaacacgtataagtcatgaagaaagcaatagcaacatactaaacgatcaagtgctaagctaacggaatgggtcaagtcaatcacatcattctcctaatgatgtgatcccgttaatcaaatgacaactcatgtctatggctaagaaacttaaccatgtttgattcaacgagctagtcaagtagaggcatactagtgacactatgtttgtctatgttttcacacatgtattatgtttccggttaatacaattctagcatgaataataaacatttatcatgatataaggaaataaataataactttattattgcctctagggcatatttccttcagtatccacacagcaaagaaaagtcttcttcctcctcccgttggcgccgccgcggatccaccccgcctccgatggcatttggcctgtggaggtgtggaggatcttggccccccgccggcgggagggaccctgttctcatttttgctagactgaacgtcttggttggggctgtgtggcggcggcgatgtcccttggtagcaataatgtctcccacatctcatccccgtctcgatggtgcgaatagcgttgttgaaggatgtgtggaggtgtgtctcagtcggatttcatgggatttggtcggtgctggtcttcgatggatttatttggatccagtttttgttcgtcttcattcgtgtggtttcaggcttgatttttccaatctacaactcccttcatcggcgatggttgctgctctggtgtgctcgtcctttgggaccttagcacaatgactttccaactgtctactacaacaaggtttgcccggctccgatgatggaggggcgatgacggtggcgcgccatcggctcgctccactgtttgtagtcgtcgctaagtggtccatagacctggttgtaatttgtattacctcttgtgttctctatactgccatgattgatgaatagattggaaattcctctctcaaaaaaagaaagaaaaaaactaaaataaaaacgtgaaagaaacaaaacagaaaccaggctggtctttccagtgcgcgtgagccggcccaaccggggttccgttcagcatggggttcgctcctgtctcgcttacaatgccagacatagggcgcccttgagatcagggcaacttagagagagagagagatcaaggcttatccctcccgcccttttctctcggttagttaattagttttgactgagatcagttccaacgataacttgggaaggcgaagccgccgcgcctatatactctccgcctccctctgccccgatcgcgcattcgcccccaacccacaaccaacccttcctccttcctcaagcgcgtcagctcctccgccccggcgacccgagcgagatggtttccgccgacgcagcccgcaacgtcgtcggtattatcgggaatgtcatctccttcggcctcttcctctcccctacgtaagcccccatcccccctcctctaatccgccgcctcttttgtagacagtctagagtaatctatatgcatggatggtgcttgttgcaggccggttttctggcggatcatcaaggccaaggacgtggaggagttcaagccggacccctacctggcgacgctgctcaactgcatgctctgggtcttctacggcctccccatcgtccatcccaacagcatcctcgtcgtcaccatcaacgggatcgggctcgtcatcgagggctcctacctcatcatcttcttcctctactccaccaacaacaagcgggtacgtactaccacatccctaaatctaatcccctcgcccgttggttttcgtctagatagaacaagatctggccctaacccatgcccgtgcgtgcgtgcctccgtgcttgcagctgaagatgataggcgtgctcgccgccgaggcggggttcatggtggccgtcgtgctcggcgtgctcctcggtgcccacacccacgagaagcgctccatgatcgtcggcatcctcggcgtcatcttcggaaccatcatgtatgcctccccgctcaccatcatggtacgtacctacaccctccttcctcgtggatcgatcgtacgtgtgcatgcatgcactctttgatccatgctttaagcccttgatccgtttgctcttaattctggaggcgcagctgttattttatttcgtttcatttgttttgaactttgttagttgtgtgttaatgcatgccgttctggtcgtatggtgtgataatatgcattgtttagaagacatgcgtggttaatctgctagctcttgatcgagtgcctttgagtggctagatgaatgcatgctgctcacctcacacagtagatgtactctccacacacaaattattttacgagacaagatgttgccttgtgtacatattctgtattttgtggctagactcacgtacgggtctggcttcacacacccaagttattttagaagatgcatgctgttcaacttacgtagatctacttcagacatccaagttatttcacaagatgttgttttgtgtgcacatgtttggccaaaaaagctcaaaggtaacgcaaccgctgcgtgtcctttccttgtggatctggacttgcatgccgtgtaaatagctatagccagccaaccaaactttctgttgcacccagccgccaaaatctcgtgttagctgttggagtgacgggtccgcaatcgcatggaagagccgttcatgacataactaaaaacatgtgatccagcacttcatcacaaacgtatgtgccaatgccccgaggatgcatgcatggatatattgcgtgcatgttctcttttgcttcttgtgatccttcactcttgccaaatctatgagttgtgatgttaattaattaaccagtgagtttgtgtacctactcattatatttagatcaggaattcaatgagtcagccttgttaattacctacgtacgtacgtgtgctcttattacctggtgatgtaagcactactaagataagattgcaatacttgattgcagggtaaggtgatcaagaccaagagtgtggagtatatgccattcaccctgtcgctggttaacttcctcaacggctgctgctggttagcctacgcgctcatcaagttcgacctctatgtcacggtcagtacatacatacatacatacatatacacatctcaaacaagtataccgattaaacccagctagctagatttttctgtctcatcgatctaactgccatgcatgcatgcatgcagatccccaatggcctcggcgctttcttcggcctcatgcagctcatcctctacggctgctactacaagagaacccccaaggaggagaagagcgtcgagctgcccaccagcaaccccgccggagccggcaacgtctcggtcaccgtggacagataagcattggcttgcagcagcagcaagcccgccgtcgccaagtgattctagtccggccggcggccgagattttagccctaaacattttgagtagttaaattccggatgatcgatgcttcaacaagtgtggtgtgctagtcttcgttataattagctagtcttgatcgagtgtgcgtttcgtgaaccactgtcgtctgccctcgtgcaaattagaactatattcatgcagaggcgcaacctggaacttaatatatgtagctgtgttgtcccgaataataattacaccacgcttgtcacgtatgtgtactctctgaatctattcttacgtgatgatacgatatcttcatgaattactgtggagctttttaattggtaaggccgcggttgtttttgtggaaccacatttatcttccgttctcttaacaccaccaccaccatgctggcttgggaacgcgacggcaaccctgttgctgagccacgataaccggtgaaaaacgacgtctacaagtaattttacagggatctcgtgttttttgttttagagaaaaagggccacagccctgcctccatttttagagtaccaaaaacaagattttttttgtttgtatggcatttttttggtctgtacattttgtacgcatctcctgattttgtacttgaattttggttgtcattgctcatttggacagacaaatgagcaacatgttttcgccgtcgat

SEQ ID NO: 16 - DNA, 17681 bp, Triticum aestivum
  misc_difference 43..52: note = a, c, t or g
  source 1..17681: mol_type = unassigned DNA
gatatgacggcgccgcgcggtggcggggatatgccatcgtcgnnnnnnnnnnccgccgccgcttcgacgtcggagcccaacacgccgtcgtcggcgcacgcgtcggggctcaaccggcgggggtcgaggggcgccgccatggcctccttctccatggaggtcttcgacaacgaggtggtgccgtcctccctcagcagcatcgcccccatcctgcgcgtcgccgccgagatcgagcacgagcgcccccgcgtcgcctacctctgtaagttcgttgcacctcgaagccgtccgcgcgcgtgtgcctgttttgggagattttcgacgccttttcctggcacagcttggcgcatttagtgtctcggtcggacgaaacgggcaattcgtgatgatatgtttggcgactcataaatgtcgcacagccgttgtagtgtttatttgggaaggttttgtgctcacgaatctcgaaaaatctatgccgcgtgcgtcgcttgttgtttttttgtttctgggctgctttgattggtatgagtttaaggggcatgtctgagatttctccgcgtatgttggttttactgcgttagctggatcctcggctttgatatgtttctccttactcgcgaagctgatcctagaagtagccagcttctctcctgtatgctgcaccatgaggtgttcgtatatgatcgaatcgacgagatggcttgtgtttgagagcgcagattagatttagttgatgcaatttccagattccaaccttctccctcgattgtgttgcttttgcttgaatttggtatctatttaatacttgctgcttatgtttgaatcattaatttaggctaggatagtgctgcgcgatcagtttgcttggaaagttggaataccatatatcaggtagctcgtgttggttcctcgcgcggtgtctctatgtgagatttctccgcctatgtcgatctagctgtacatgctgcgctagattttggattttgtgtgttttctccttttttcagtagctaattttgtggcaggtttgcttctgtatgtttttcggagtgcagagctgcagatttgattcatctgatggcttttccgacagttctccctcattttgattgaatatgagcacgctctgtgttgtttgaatcatgtcagatatgacagttttgctctaccagcttttcttcgaagagtgcataactgcatgtcacgtagcacgaatgggtgcttctggttcgccctttttcgggatctcactttgatctgttattctgtgaactaggtcggttctatgccttcgagaaggcgcacaggctggaccagaactccgttggccgtggcgtccggcagttcaaaacgtccctgcttcaacgattagagaaggtgtgagacatctttctctgtctcttcccctccataatttctgcatgatctagctgacttggcgtacacgagggtttgttttgttagttgatacatgtcgatctgatcatgttccctcgctggttttgactgggtgactgtatctggccttcatagatatattatgcaagttgttgaagtattattactactatcttagctttttaactgcttgcaggatatataggcaatatatgagtttgtttggctaataagcctcatggagttaaaaacaagctggaagctaatatggacgacactaccttaatttagttgtcaaaatgtagtagtggtccgagttatatgttgtccaaatgctcacataaaccaaagggaaataggcaacatgcatgcagtttaagacatgaaagtatttcctacttttcatttttgtgttgtaatatatatcttgcagatacacgatttttaacttgaagagtatggtcgctggactttaattcagtacacatttgtttcatgataagcttaccaactccatgtccaaatacatgacgtagaaagcatgtagtcaaacttctctacctttgaccattagtcaaatcaaatcatttagtttttttaatggaaattataccattagatttgtaattcagaacagttttttttttgcgaaggcagaacagtttcactatatatactttttacttatatatgttgttcattaaagactcaaaatgtaaaacattatctatcttagaatggtgggagtatatttgattattagtgataagttgataactgtcgatactcaatctgggaattttattgtcattatcttaatttgatgaccatattgggagttgttatcagccaagcaaacctgcaagctcacttaatcctacctaacagataaagaacactgttctattaatagaatggtgtgctttgttttgttgtgattatcttaatttttaaccatattgggagttgtgatcagccaagcaaaactacaagctcacttgatcctacctgatagataaagaacatggttccagtaatagaatgttgtgcttttctttcaaagtcacaactaaaccttcagttcagattcaacattaattttgtgtttctgctgaggagggggatgaggtaaactgacttcagattacaccatcctcctcatgattcgtctcaactctcaattgatcagtttgcaatggcagattcttgtttgttagagatataatgaggtagccacattctcacctgagcttattttttcagatgatcaagttcaaatttaccactttgttgtttcctacttgaaatggccagcgaatgtagtagaatggggaaaaggagcaggacttagggttcccttgttttcttaatcggattttgcctaacctactcttgaatccaaagatcgtgccttaaaatttcccatttcgctcctacgcaatccaacaggataatagcccgagtctcgcaaagcgattgaagaaaactgatgcccgcgaaattgagagtttctatcaagaatactatgagaactatgtccgcaccctcgacaaaggggaacaagccgacaggtaattcccaatccctaacctatagtgcgatctcctctataagtccaatccctcgctatcacgaatccggtcccatgacattgtcgcctccaggactcaacttgggaaggcctaccaaacggctggagtcctcttcgaggtgctctgtgccgtcaacaagaatgagaaggttgagcaagttaaccccgaggtttgtgctcactccagccaactgtcgtcgttctttctcattagaaatctaggttccctctaatgcatcgagtttctccaaatttcctctgtgcagattatgcgctggcacactgaggtgcaagaaaagaaagacatctacgcaccgttcaatattctgcctctcgatgcggccagtgcatcccagtccatcatgcaactagaggaggtatacgactcgcaacaatgcagcctatttcctcaaaacaggaacaactgcatcatgtactggttcaattaaagaaactgacgtggtcactgaatgcatcattaacagataaaagcagcagtcgcagctctgcggtacacacggggtttgacctggccttctgcatttgagccggaaaggcagaaggggggtgagctcgatttgctcgattggttgagagctatgtttggctttcaggtctgctactcactccaggcaaaccaatttcgattggtccattgtattactaagctaacactagcttatcttcttgtgtgcagcgggacagtgtcaggaatcaacgggagcatttgattcttctcctcgctaatgtgcacattagacttgagccaaagcctgaaccacttagcaaggcacactcttctatcgatatttaccttgacagcttgactttatgaatatcaatgtgataagcataagatcaatgggttttgcatgcataaaaatgtggtggtagcttctgacggaacaggatatttgtctgagtttctaatattttagaaaaaataatgttatttttcattggattagtaaccaattatttaccttcaatgttatgatgtgattgtttgtgtaacttgccatataacatacacatgcagtttaatttctttcttgatactactacttttgatttccatattcttgacattagaatttgctggactggtgccactacttgcaaaaatagctgacttgttggcattctgccacgaattcgattgattgaactttctgtatgcattattctgaagcaagtgcgtagctaaataatgttaattacaccctccatttaccatgctttccttctctcctttttgttcattgttgcgtgatgattgatctcatccattctttcacccctgaaacagctagatgaccgagctgttgatgtagtgatgaacaagttgttcaacaactacaagaagtggtgcaaatttttgtcacggaaacatagtttgaggtatataattccttaatcagtttcctctttatgtacattattgtgctgataatcttgcaactgcagaaatcctccaggtgctcaattacaggaagttcagcaacgcagaattttgtacctaggtctttatcttcttatctggggcgaatcagcaaatatccggtttatgccagagtgtctttgctacatttttcacaatgtaatttgcgcattcttattatcatatcaagtaccaaatctcattgcaaaaatatatctttgaatgattcttctcaatgtgttcagatggcatatgagttgcatgggttgcttgctggaaatgttagtattgtgactggtgaaaatatcaggccatcttatggtggggatgaggaggctttcttaaagaaagtggtcacacctatctatcgtgtcatcagaaaggtactttgagaaattaccattacctgaaattccaagttagtttgttctaaatataattgttgtggtttttcaggaggcaggaaaaagccaacatggaaaaactgcacattcagcatggtgtaattatgatgatctaaatgagtacttctggtctgtttacagccctattttctggtcacatgctgacagcttttttacactttctctgatagatcctactctgtttcaggacacctgattgtttctcactgggatggccaatgcgagatgatggcgacttcttcaaatccgtgcatgattcaaggcctgtagcagtggtacagttcgatatcagtctgtcagtatctcttccaaagacttcgattaggaggagaatactgacaaataactatttgtaggctggaagctcctcaccaaagggttctagtaaaggcacaggcaagacaaattttgtagagacaagatcgttttggcacatctttcgtagttttgaccgaatgtggaccttctatctgttggctctacaggtactgtgccgaaattttcgatgggcttttttctctgtactatggtttttgatggtttgacactctgtgaatcttatatttttaaaccgaacaggcaatgttgatttttgcttggagtgaatactcagtgactcaaatccttcagaaggacctcttatattctctatcaagcatatttgtcacagcagcatttttacagttcctccaaagtatgtttcccatttcaaatacttgttttatatacaaggcatttttctgatgcatgtaatatttccttttattttttgagaacctgaaatttttagtatgacaagtgatgaatattggcataatttagttctctttatgtatgtactaccttctgcttttgtcaatggcattacggtaacactatgttaagctaggttcccgtgatacagagcactttcacagcagaaagcaactggcaagaacattcatgtagatatctgcaactttaggatctcttctcatatgcattaaactagtgttactataccgagcagtcatgttcttgagatgctctccgatctggaattcttgtggtcttaagagggttctggtgcaataacaaattcgtcatccaaactgaaactgatattttctttgattttgatggcaggtattttagactttattctgaactttcctggccacattagatgcaagttcattgacgtcgtgagaaatattcttaagatagtagttagtgccgcgtgggctgtgattcttcccattttctacatcagcagtcaaacaaaagtcaatttaccactgaaaaatctggacagatggtttggttatgtgaaaggagtgccacaactatatatcctggctgtggcggtgtacctgatacctaatatgattagtgcaacgctcttcctgtttccgatgtttcgaaggtggatagagagctcggattggcatattgttagactgctactgtggtggtctcaggtattcaattcaatctattttatttgtttatgttctattatgtggaaaattacatatgcagcttatcctcattgtaaatattcatttcaaaatttctgttatgaggcatttttaataaggtaatatttgataaaatggaactgtattttgtagaatgaatttgtcttgatatccttgccagcttattgtttgtcatagtatcctagagggttgagaaactactgataaattgtaaactgtaactagcaagaagagaaaataatccaatgacttctgatgccagggcagagattatcctgctattttgtcattagtttgaaaaaaagcattttatggttagttaaaaagttctcccatgcttgtaaaaattgatagttttcacttctctaacaatatgtgttcaactgaacacatttgctatcccagtaatgaaaatgatattgcaagggtatacagatggacaaaacagggtggaaaacgtgaaggcaatagattattttgtatgcaatgcgtggaagtaaaataactggatgaatttccctggatcataatgcgctgtacatttattcgtttttcatatttatttcttgtgcggcttgctacactacactaatggcaatgcccattttccttgttcttgctgtacatgctaattgtataaataactgcagaaacgaatttatgttggccgtggaatgcatgaaagtcaagctgctcttctgaagtaagttactctgttcaatttttcttctgttagagctttattttgcagaaaaaactcaattctcttctattcaactgagaaggtacacattattttggattttgctgctatgcgcgaagctttccttcagttactttgtccaggtaagttccatgcttagttatttgcaaacatgctttgacgagattgatctgaaacagtttaatttgcagatacaacctcttataaggcctaccaaggatataatgagtgttcataacattcgttatgagtggcatgagttttttccaaacggtaattccaatgcttttttttgggtgccgccttcattctggaacccttttttactgataattcgttgccttttcagcatcatataatatcgctgctatcctatccctctgggcccctgttctgttggtatgcactgatccagcctgctagtgtagtgcctatccagctatgtattagctgagaagtagcttcatttattcccatttctttagaaactgcattctaaatcttggtttatcaactacaatgcttttattcttgtaggtctatttgatggatacacagatatggtacgccattttctctacaatatccggcggtatgtctggggcacttggacgacttggggaggtaatgatagatctgaactattctctgtaatctgttgttttgctttatagtttagaacttataatgaccataagtgtagtgcaccccaagattgatggatagttaacgggctttttctttatattcaggagtaaactgaacgtgtcgaggtctcggtcaattgcatgaaccaaatactccctccgtccgaaaatacttgtcatcaaaatggataaaaggggatgtatctagatgtattttagttctagatacatctctttttatccattttgatgacaagtattttcggacggagggagtagctcgtactccctccgtaaactaatataagacgctcttatattagtttacagagggagtactttataaacataacggcgggctatgtagatggtaatacagttttatgcagaatattttgtttgaggaagcttagtgaggtattttaatagtggaaatcaccttttttgtttttgcagcctgagaattcagaataaactacattagattataatggtaatttcaagtagataaatatggaagtgtattcacaaggcaaatgggatattcatttttaggaggatcctctgggagtcgcacttcagtcttgtttctgttatgctgccgtatttacaagaaaacctttttcatattcatgaaatgaagcaaaaattctattgctggtggcttcgtgcatttatagtcggatattctcctttttaaccgtcaacatttttgtattagcactgccttttttactttgttattgccctacagcgttgtgtaactttttctttttgcgagagttaagaagctgaacaaaatactgttctggtttctgatggagttgctacactcttgtaccagattcgaacactaggaatgctgagatcacgatttcactctttgcctggagccttcaatacatatttggtgccatcagacaaaggcagaaacagacgtttttcactctcaaagcgcttcgcagaggtaccaaatgacaataacgaaaattattgtcaagatttcacttataaccccccttaaaagttatgatataatgaagaatttaaagtacaggtttcccccaacaagagaactgaagctgcgaagtttgctcaactgtggaatgaagtgatttgcagtttccgcgacgaagattttataagtgataagtgaggcccttagatcatgttcacctagaaaacattatcattgcaatgcagataatagaccttctgttatgcagggagatggacctattggtggttccatactcgtcagacccgagcctaaaattgatgcagtggccgttgttcttgcttgctagcaaggtttgacagaacaaatttaatatgtccagtctaccttgttacatgtttgtgttcggctcttactggaaatcattttgattgaaatttgcagatacctatagctttagacatggcagcacaatttagaccgagagacagtgatttgtggaggcgtatatgtgcagacgagtatatgaagtgcgctgtaattgaatgctacgagtcattcaaacttgttcttaatttagtggtggttggagaaaatgaaaaaaggtatcttcttatacttccatttttcactgtttcacgtatctctatgtgagaaagacattgatgttgtttgtcatagcttttaggtattcagttaatgataacactaggaaataaatacttacatccggaatagacattgtgcactatttttcttcaaaaaaatcgttactagtacctagtaggtttcttttgcccgcacagtacctatagggtataatttctatgattgtctaaggctcctctgttgacgaatccttgccacttttgagcaagacagggccacccaggaaatcatttgtttcgttccaatatgataaaagcattcttaccataaactgggaaacacgcaggtcaggacaagtattttttaacatataaagtggtcagacatggctgaatatttgtagtttgaacatgcacgtttccattcgtagtagtgatgccaaaaatcaatacaaatatattactccctccgtccggaaatacttgtcctataaatggataaataagtctagatacaaccatttctaggacaagtatttttggacggagggagtactaaaaatctacaaccctatatgataatggggtttgagagttcaagattacaaatccattacttttaccaataaatatatatatatctggctagttgcgtatggctgcacatcatcactttcaaacttaagaatcaagatattccaaactgaactagggagaagaactgccaaacacctccattgtgcaatatgcatggaagggaaaccatgattagttgtaactgctaaatgtgcaacgtgtgttagataggcagccttagtactattggaggcatctgtgtccatctttcatgtttttttttactgcattgttctttatcattgcatgctcactgttatcttgatcttctactgacatgtttgttcactaacttcaacaggattattggcattataatcaaagagattgaagctaacatcgcaaagaatacattcctcgccaattttaggatgagcgcattgccagtcctttgcaagaagtttgtggagcttgtatccaccttggtaagcaatgttcttacctctactgaacaccaaccctattgaagattgcattgcttgatatttttttagacaagtaacacgttcaattattgctacgattatgtgatcacatctgcagaaagaaagagacgcctcaaaatttgataatgtagtgctattgcttcaagacatgctggaagtgatcacgagggatatgatggtcaatgagatcaagtaataccttctgcaccaattttaatcatacatgtgccttgtcatagaaacttatgactatatattttttaacatgtgttgtttacagagaactagctgaatttggtcatgggaacaaggatttagttccaagaagacaactttttgcgggcacaggcacaaagcctgcaattgttttcccaccaccaatttctgcgcagtgggaagaacaagtaataacatcacattcttatttggcttttgtaacaaagaaggttcactaacttcacctatctacagattaagcgcttgcaccttcttttgactgttaaagaatcagcaatggatgtgcctacaaatcttgaagcccgccggagaatatcatttttcactaattcgttgttcatggagatgccacgtgcgcctagagtgcgcaaaatgctctctttcaggtttgtctcgtatgtaaactttcaacatatcacagtgtcgtccacttttctaaatatatcgcagtattgaaaatcataatgtctagctaaattagctggattcattggagcctggcagctactggctaatggtccttttactgtgcttcttaaaaagaattatatctgcttgtcaagaaatattttgggctgaattatggtatgttcttaactctgatcagtttgaaagaacagaaaacatgaatatttttgggcgtggaatgtgaatttgtgctagtcaggaaagaggaaagcaccattaagaccaaggagaagcttatcaatgttgggattttaactgaaatttttgttgtttgatgaactcatattctgaactaaatggcgggggtggtttctaatttttacggtcagttgtttaggatttttttaattacaggttgttattttgagcactgccatcctcatcgtagtctcaaaaaacttcttgctgtcatttgatgtgtcgtttaagctaaaaatggagtgatgccattatggtattgagttgcttttgaaactgtctttgagtctgtcactctcattgtctcagcagatttgcatgccccttttcggtattaactacagactcggagttttgtgtcttgaccagttaacccaatggcgccatgatcatactagaaccgaagttcatctacagttttgatcagaattcatttaaagttgcattatattacaactgattctgtactcatcagctcatgttcgcttgatggtaaacaaaatttataaacagaggctcatgttcgcttgaacatccacaatgtctggcagtggcactctgtaatcttgttacttgtacaagtacatctgtttccaccttacaggaaaaatgcacctagatattctaaaaaaaagaacaagtggtgaacttccaggtggagacctgtacaatagaatgtgtgccacccatctttaagtgcattcataatcaaatcaacaacgtcaacaccagaaatatattatcagttcacaacgacaaatatctgataaaccgtatgtttaaattttctgtgatcataagagtttcagcgaaaaagattgggctctagatgattcatatgacacttgttcttcacagtgtaatgacaccatactacagtgaggaaactgtatattcaagaaacgacctggatctggagaatgaggatggtgtatcaattatattctacctgcagaagatctttccaggttcctttcctatttgatgtgttttaatgcctacagttctttatgaatttgattgccagctttttgtcttctattcttgataattcttgttatatagatgaatgggataatttcatggaaaggattgattgcaaaagagaaactgaagtttggggaaatgaagaaaatgttcttcaacttcgtcattgggcctctcttagagggcagacactatgtcgaacaggtacttcggccatacccttcaaccttgtcaaatatggatcatttagctgattccgtgtttacatgtttttcgtattgtgaatagtgagaggcatgatgtattacaggaaagctttgaagcttcaagcattcctagacatggcttctgaatctggtgagcttcttcaacttccaattcgagcattcctagacatgatgtatttagctttcctagacatgttcacaaatataagatgttttggatatttcaatatggactacatgtggactgaaatgagtgaacaaacacactaagcttctatcaataaagttagaacatcttatatttgtgaacggagagggtaccttttacaaatacttcctgattttatattgtagaactaggggccctagtctaggggagcatccgcaataggtgcaaaaagggggatcttaggaatattttgagagagatgaatagttttttttcatgtaggtaccatcaagagaagagaattaggtctacatattgtagcatctttttagaagttagacccaatgttattggacacttggaaggggtctatacactgaggatgttcttaggaacaaactcaaactgggcttacaggggacttatacaaagtgtccaacatcaccctcttttgtttgcagagatactagaaggctataaagccattgcagatcctgcagaggaagagaagaaaagccaaagatctctgtcttctcagcttgaagctatagcagatatgaaattcacatatgttgctacgtgccagatctatggaaatcagaaacagtcgggtgatcgacacgcaacagatattttgaacttgatggtgaagtaagtgatctcgatgatctattctagaaactaatatacaacatttggccaagcgcaagatacatcatgtctaccccaatgagcaaaatgttttcttgtataactctttggagactgtgtgtctcggttatgtttatatttagttcacatttaattgataatgagatgttccttgagggaaaattttgaattgcttcttttattcaaattgttatttccgtctgtgcaaagtaattttagttaaaatttgaaactacagttatcctggtctccgcgtggcatacattgatgaagttgaggagagggatggtgagaaggtgcaaaaggtcttctattcggtgctagtaaaagctcttgacaatcacgatcaggtaatcattttacgtgaagcgagttcaaactttcattttggttctgatttaaacctcagtactcagtagtgcgttatgtacttttttgtcctgtgaaggaaatataccgcataaaattgccagggccagcgaaattaggtgaagggaaacctgaaaaccaaaatcacgcgatcatttttacccgcggagaagctttgcaaaccattgatatgaaccaggtgaacttcatggttatagtacggtagtacctttcgggtaagtaggttgcattctgtcttttgtacttatcaatgctgtttaggacaattatttggaggaagctttgaaaatgcggaatttgctggaagaattcaatgagaaccatggtattcgtcctccaacaattcttggagtacgtgaacacatattcaccggaaggtgtgttttaagcttttgcagtaggttttacttagttttctttgtcaaaattgcaaatcaatgcctaacatctgacattgctggattgtagtgtgtcatctcttgcctggtttatgtcaaaccaggaaaccagctttgtgacaataggacagagggttcttgccaatccattgaagtaagcctgaatatactttgatatgtcctatttgaattaagcgcaatccatagttatcatatggagcattttgtgtcatttatatgctgcaatatgagtagggagtgctgagcatctatggtgactatctcctggatgagcccttatgttttttgtatcagctcttgaaatgcacacacatgtttgttggagattttagaggcaataaggccataaatattaaaacaaccaagtgctatttcctggaactttcctggcatcaaatcttttgaagctaaacaatgtcatcaatttaaagtgtatattgtggtctaagtgctgtatatctgacatgctatttcctgaaactttcctggcatcaaagcttttcaagctaaacaacgtcgccaatttaaagggtgtattattgtgtatgtgctgtatatctgacatgctgtttcctgtcagtaaagctttttgagctaaaaatgtcatcaatttagaatgtgtattatatctaagtgatttatatctgacatgctgtttcctgaaactttcctggcatcagagcttttcaagctaaacaatgttgttaatttaaagtgtgtggtatggtcattggtcattgctatgtatctgacattctcttttctgggcagggtacgttttcactatggacatcctgatgtgtttgataggatttttcacattacaagaggtggaattagcaaggcttcctgtggtataaacttaagtgaagacatttttgctggtatgtacttttccacctattctaactcctgtggatttttgagggaaatctaagaatggataagtccctgggacatccacatcctcatatatgtgactcaaactgggtttgacaactgattcacacatgggcctatatgggtgtcatgtggggcacgtcctacaggcgtgggccacgcggccaggagcagcagccgtcggccgcatcaggcgaggcgtaggctgggcaggagtcctggtcctgatacattagttcctagaataaaagactagtttgttacgcataggtttctagtttgttagcagcccatggggcctttatatatcgtataatcagcaccctttaagggcaagcaataaagttattatctcgtacctcttcctctgtctcctatcctctcctcccgcaccattgagcagccaggcaaaaaccctagcgctcctatccatcgagactacgaactacgtagtcgaggccccgctgtcttgggcactgaggcccttgacaatgggcctcagacagactactctaaactcgattaagacactgatgctactcttatctaacacattaacgcatattccaacattcccatttctgctctggaacaacacaaacttaaattttctttttcaggtttcaactcaactctgaggcgaggaaatgtcacccatcacgagtacattcaagtcggaaaaggacgtgatgttgggttgaatcaaatttcactctttgaggccaaagtagcgtgtggcaatggagaacaagtgcttagcagagatatctaccgtttgggccaccgctttgacttcttccgaatgctctcatgttacttcacaactgtgggattttatgtcagctcaatggtacaaaacatctacctgcatcacatttgtcttgatttgccatcgtccatgttttttgatgttcttattactgtgcagatggttgtcataatagtatatgttttcttgtatgggaggctttatttagccttaagtggacttgagtttgcaattaggaagcaagcacgaatgagaggcaaccgtgctcttgaggcagccatggggtcccaatctattgtgcagctaggtcttttgatggccttacccatgtttatggagatcggactggaaaggggttttagaagcgccctgggggatttcatcatcatgcagctacagctatgtgcagtattctttaccttttccctcgggacaaaatcacattattttggccgcacaatcctccacggtggtgcaaaatatagagcaactggcagaggctttgttgttcgccatgtaaagttcgctgaaaattacagaatgtatagcaggagtcactttgtgaaaggacttgagctcatgttactacttgtagtgtatgagctctatggtgatgtggctaccgattccactgcctatgttctgctgacatcatctatgtggttcttggtaatcacatggttgtttgctccattcctcttcaacccatccggatttgaatggcaaaaggtggtggatgattgggatgattggaacaaatggataagcagccgtggcgggattggtgtgccggccaataaggcctgggagtcgtggtgggaagaggagcaggaacatctgctgtcaacaggcatcatcggccgcatatgggaaatcatattatctctccgattcttcatgtttcagtatggtatcatgtaccacctgaatatctctaatggcaacaaaagcatatcagtaagtcatcctttatttttgctagtattttacaactctcctcgaactaaatggatttcatgagactgattacatgaactttttgattgtttataatcactgtttacggatacaatttagtgactgtcccttccaaatttgattttgtggcttcagatttatggtctgtcttggctggtcattgtagcagtagtgttgatcctcaaggtaaatttcatttgcttgctgtcgatgaaatcaataagtatatattggttggcgtatgcctctagtttatgtccttgttatgctgctgatatggtgccattttcttaggtggtatctatgggaagaaagaaatttagtgctgacttccagcttatgttccggctcctcaagttgttcttgttcattggatctgttggaactttggcgattcttttcacccttctgcaccttacagttggtgacatattcgccagcttccttgcctttgtacccacaggatgggccattctgcaggtacgtcatcagcaccaaagctttccttttgttttattttaaggttttactcccagcttatcacgagcaaggagcgaggagtgaggagcagtatcaattcatagggagagagaaacgagagaattttgatcgagttaaagttgctattatcgaaattgacatctttcactggctctaatcccttcggcatcattgcaacagatatcacaggcaagcaagccagtggtgaaggctttagggctgtggggatctgtgaaggccttgtccagggggtacgagtaccttatggggatcgtgatcttcgtgccagtggcggttctggcatggttcccttttgtctcggagttccagacgaggctgctattcaaccaggcattctcccgaggcctccaaatctctcgcattttggctggcggaaagaagcagaactga

SEQ ID NO: 17 - DNA, 21203 bp, Triticum aestivum
  misc_difference 567..1407: note = a, c, t or g
  misc_difference 16757: note = a, c, t or g
  misc_difference 17291..17566: note = a, c, t or g
  misc_difference 18044: note = a, c, t or g
  misc_difference 18934: note = a, c, t or g
  source 1..21203: mol_type = unassigned DNA
actagcaacgagagggaaggagtgcatctacatacccttgtagatcgcgagcggaagcgttcaaaagaacggggttgatggagtcgtactcgtcgtgatccaaatcaccgatgatcctagcgccgaacagacggcacctccgcgttcaacacacgtacggagcagcgacgtctcctccttcttgatccagcaagggggaaggagaggttgatggagatccagcagcacgacggcgtggtggtggaagtagcggggatcccggtagggcttcgccaagcactaacgggagggagaggaaggcgccaggggcttggattactgctgtcctcccttccccccactatatatagggccaagggagaggggggggcgcagctttggcccttcctccaaggaagggtgcggccagggaggagtccttcctccccaaggcacctcggaggtgccttccccctttaggactctcccctcttcttatctcttggcgcatgggcctcttggggctggtgcccttggaccatataggccaaggcgcaccccctacagcccatgtggccccccggggcnnnnnnnnnnnnnnnnnnnnnnnnnnnnnnnnnnnnnnnnnnnnnnnnnnnnnnnnnnnnnnnnnnnnnnnnnnnnnnnnnnnnnnnnnnnnnnnnnnnnnnnnnnnnnnnnnnnnnnnnnnnnnnnnnnnnnnnnnnnnnnnnnnnnnnnnnnnnnnnnnnnnnnnnnnnnnnnnnnnnnnnnnnnnnnnnnnnnnnnnnnnnnnnnnnnnnnnnnnnnnnnnnnnnnnnnnnnnnnnnnnnnnnnnnnnnnnnnnnnnnnnnnnnnnnnnnnnnnnnnnnnnnnnnnnnnnnnnnnnnnnnnnnnnnnnnnnnnnnnnnnnnnnnnnnnnnnnnnnnnnnnnnnnnnnnnnnnnnnnnnnnnnnnnnnnnnnnnnnnnnnnnnnnnnnnnnnnnnnnnnnnnnnnnnnnnnnnnnnnnnnnnnnnnnnnnnnnnnnnnnnnnnnnnnnnnnnnnnnnnnnnnnnnnnnnnnnnnnnnnnnnnnnnnnnnnnnnnnnnnnnnnnnnnnnnnnnnnnnnnnnnnnnnnnnnnnnnnnnnnnnnnnnnnnnnnnnnnnnnnnnnnnnnnnnnnnnnnnnnnnnnnnnnnnnnnnnnnnnnnnnnnnnnnnnnnnnnnnnnnnnnnnnnnnnnnnnnnnnnnnnnnnnnnnnnnnnnnnnnnnnnnnnnnnnnnnnnnnnnnnnnnnnnnnnnnnnnnnnnnnnnnnnnnnnnnnnnnnnnnnnnnnnnnnnnnnnnnnnnnnnnnnnnnnnnnnnnnnnnnnnnnnnnnnnnnnnnnnnnnnnnnnnnnnnnnnnnnnnnnnnnnnnnnnnnnnnnnnnnnnnnnnnnnnnnnnnnnnnnnnctatgtatccacacatgtatctgagtttcctatcaatacaattctagcatggataataaacaattatcatgaacaaggaaatataataataacctatttattattgcctctagggcatatttccaacagctagagggatggccggggcggcggctagaccggcgggggggggggggggggggggggggggggggggggggggggggggggggggggggggggtgttctgtggagggtggggcggcgaggcggtcgcgggtggcggtggccggcggttcggccggcggcatgttttggcggtcggggagctgaggaattagaagatctagctgccacacgattttaacccaacggtccacgaatcgactgatgcaaactcaaaaatccagtcgactgaactggagccatacccttgcaaaactgtccaattagggcgtttgttttccaaagatgtcgtgttctccgatgctttaatctgcataaactgcagcgcatgtatgtgtggctactaaatgagcataaacggcctgtaatttttcttttagtacgtctgtgaatctaaaagtgtggtgaagaggaataaaacggaggtagcaaaccgttcaaaagaagaagaaaattatacaggcccaaaaaaaaagaaaaggagggagtacaaattatttttctttcctactacctggtcattttctgaaccactcatctatttccctccaacagagaaaggaaaactggcaaaggtgagaaagtgtacattgaaattgtaagaaaatctcaaaacaagatgcacacgggaaaggcatgcacggctgaccagacgtcacgcggacgacttgcactcgcatcgtgcatgtctgcctctctctttctgtaacaaagctaggccacaggggagcagcatctacatattcttgtgcccactgacattgctgcaaacggatgtggttcttccattccctccctggctttttaagtattgtggacatcggtttgagcgacaattaatatttgatggagacagcactatttaatgctggatcatgcacgttaataggatacggacacacacacgtaggtgctgtgccgtgaggatattaggtcatttgaatatcaaatctacagagaaagggacagtgtcgcagttaatggaggaggaatgttgccggatcctcgcacatcacgtctcgtggatgctgcatgaacataattctcttactccaatataattcacttttttcactttctgacttttctcgcgatataattcgattaacaatcatggtggtctagcaagcagctagtcccttttgggcgagtagctagtgcattcttatgctgtctagtgtctatatgccaaacggacacaaagttggttaatcaggacagctggctaaggtagataggagtactactagataatatacgtggcggagtaaagctagtgcggtggctgattctccatcagcctgaattaaacagtggctcatacatatgctcgtcagctagctccccggtcgatcggtggtaatcctccccgcgctgattggcagccggctggtctcgttttcagctgctgtgaagtgcagttttacttgttccgcgtgcattgtcagatttctgtgaattactaataattaaccggtcttatcttaggcaaactactgtattagcctgttcctgcgtgcacctccgccatggctgcgtgccgctgccggccgggccagtggtgaacaggcctgcctgtccctagagaccgaccaagaccacgggaggtccgggagccgtccagaaatggccatgggatcgatgcgtcctgtcgtttaacctgtgtgtcgccgctttgctttggctttacgccaagcaggttagctagaccgtttcagtttcatgtcaggtcagcggtttcctctctctctcgtgctctcgtggagtaccagagtagggcctcaacctcaagccctcaactgtgccactgtagcagtacagctgcgtgcaagtagtccgtagagcacatgcatttgatgcatgtacgcgcactgtgcaggagctgcgggcagggggcagcggcagcgggtcaggccggagaaaaggagactttcggcctcgcctctcctttcaaaaagggatattttttttacctaaatgctagatcgtgcagttgcgcgattttgttatggctagcgcacgcgctatacgacaagaaattgcatgcttctgttcttcgcctttctctcccgcacgtggtccctaatacacaaccaacgaaaagaaattaggaaaatcagttggtccaccgtgtctcagtgcgcacatcctgtgatttcctagcaagatcccatcttgtatgcatttaatttgcgttttcaaactttcaaaaagctataacttctgaaccgatcatcgaaattaagatttgttttcacggctaggttcctcgctacgagctctttaaaactagaccccatatgagtacgttttgactaacttttttatgagccacattgggtgaaacggaagcaactttagtgctacaggaaagcaacgtactgttagtctgcgtaggaagactgtctatcatcgaaaatcccttcgaagttatctaccatgactatcaagttaactagcttcatctctaagtgtcctaccataactagtttagtttcgcctccaagttgatagtattgtcggcaacttagtttttgaggtaggctaaaatttatcctaagttgcctgccatgactagggagtagcttaacatcattcttagttgcataaaatgcttttcggtatggtaagcaacttagtttcatagatatgcaacttagtaacacttattccaatgtattgtaggcaactaaaacagtaatgacaggaaactaagcatcaccgttaggcaacttcagagtgtttgtaggcgatttagaataacaatgataagcaacgtcataatatttgtaggcaactaatttgaaaagttaggcaactgatcaacaattgtaggcaactgtgcatcaatgtaggcaatttatagtattacacttatggacaacttttcagtgtattgtaggcaactgaaacagtagtggcaggcaactaagcatcaccgttaggcaacttcagagtgtttgtaggcgacttaaaaaaacaatgataaccaacgtcacaatatttgtaggcaactaatttgaaaagttagacaactgatcagcaatggtagcaattgtgcatcaatgatagacaatttacaatatttataggcaactgagcagcgatgataggcaactgattaccaatagcaggcaactgggcatcaatggtaggcgattgcatagtatttataggcaactgagcatcaaccgtagacaattgagcagccatgcattataggcaagttgggataatgttaccaaaattcatatgtacaaatagtgcagtgaagttgcttacatgtagcactaaagttgcctcatattttcgtgtgtgtttctcggcttgacacaaaccaacctaatagacagtcctacaagaacgaaaacgggagtttgttttcctatagtacactaagaggtgaatctagtcaattggtagtcatgataagaaatttagaaagactcctcgctgataggtagtcatactagagaataaaaatgagttgctttcttatagcactaaagttgtctccgtagcacccaaagttgctctaattttttttgccgaaacctaccgatatgggatctagttttgaagaactcattgtgagaaatctaatggtgaaaacggaactggatgttcatgcctgaatcaaaagttacgacttttaaaactttttgaaccccaaataaatgcacatgggacaagatgtaggctgattccatcggtacggctgtgcactacaggatgtggctagacagattcctttcctagtatacaccaatggacacaaggacatatacttttgaagcatgaattttccgtggtccaaataattaattttccattgttgaaattaaatgtgtgattgtgcaaacaataaatttgccattgtccaagtatataattttgccatggtttgaagggtgagtttttcatgttctagaaaaaataactttgttatggttaaaaaaaagtaaatttcccatggtctaacttacaaagttgttggtccaaacaacaactttgccaaggttggaaaaataaatttgccatgtttcaaaaataattgaccatgtaccagaaattacccatcatggtccagcaaaataaatttgccatggtccaatataaagttccatgctccaaaaaataaatttgccatggtaaaaaaaagtctgggatggtccaaatataaatttgcgacggattgttaagcaaatttgccatgctataaaaaaagaaattttccatgatccaaaataatcatgctaaaatgccattgtagatcatggcaaatgtggattaaaaagaacatgtataggggaaactatacttatcatggcatatgtgcgacccattattaatgcaaacagtgtatttgtctaggtttcattaaaaaccgtgatataattgataagactcgactagacgacgcatcgctggttagtctgatcttccacggtacttgcgaaataacaatgaacgacggcaacaatagtcgcagaagaaatagacgtagaagaaaagaaaccttcagatcaaacgagtaaggtaagaagccaaatgagaagacttgcaccaaaactgatatgtgatcagacacgagcacagcagcaacgaatctctaggattcgcaagaacacatccttggtgcctcctgacgtgaggccttttctgttgtttttattcaactccaaactaaaacaaatctgcccccggtacaaaagtgaatatgcctaatatataggctgacacaaaccagccgcaaacagcgtaccaaacccgtccgtcgcaccgttttgcaaaaacgcccctgcgttttcatgaaatcaacccgcagtccggatttaagtcacaccgaaccgttattttacaggttttcgaaaacaaccctgacgttttaggtattccatccgcggatcatatttaagtcaaacaaatgcttttctaaaccatccatatcttttaaaccgtaactccaatttaaacatgttatacatgaaatttgattagaaaaatatgtagaatatgaatataagattattttaacctgttaagtatttataaatattattttggaagatatttaagtcaaacaaatggttttctaaattatatgtatcttttaaaccgtaactccgattttaaaatgttatatatgaattttgattagaaaaatgtgtgaaatctgaatatgatgttaattttacctgttaaatattttttagatattgttttggaagcaaacttataactatagcgcacgatccatttttctttcgtacaggcggcgatccggattgcaaataaacacccactatagtcatataggaaaaagaaaacatcgagaactacacatgcatacctctgaatacatcgcaggggaaaacaacagatttctcatcacgagtgtgagagaaagcgagagagagagagagagagagagagagagagagagagagagagagagcgggagagagagagagagggagagagagacgtcttaggattaaccacattcaaacacgttttggtttgtgtgaacactaaggccatcgccggcgagggtgagaagaagaataagcggcaacacaaatatgatgcatcgctaaaataaaggagatgaacctattgtggtcttgagtgatggttgttcagttaagagtgtgtgttatgttttttttcccgttgcaacgcacgggctcttttgctagtctagaaaaacaaggacacgtcttctctcctagtactagtatttcttaattataaatatactaattaatctttccggccatgttgattagataggacttgtttagaaaagaaggactttgcctactaccgaacggagaaggcaccaacatccatttatcatggagggagtcctgaagtttggtttgacagtatccttcttcggttcaactggtgtaatcttgaagttaaatgagcggatctgtaacacatctggtagatcatatcttgaatgctgcagtatatttgcaactgaatatattgtcaagtgtgtcttttgttcagcacgtggagcagcaccaagtaaacctgctgtgttttgcaccggaaaaataagagagccattgttgggcacatcatcctctgcctcttgaatcgaagccatcctcagcttcaaagcaacctttgtgatcttttgttgtggagaaactttatcatctaccttgatgggattggcaaacatcggtctcagcacattccgttttccattataccaaaatgaataagtattggacctcccatcatgtgtggctccatgatcatattgccaaggcctccccaacaatgaatgacatacattcattggaaaaacatcacatatcaccatatcagtataatcgccaacagaaaaattcacgcggactttatgagtaaccttgaggttccctgtatgatacatccactcggcacggtatggttgagggtgcttccatgtaggtaaccccaaagcttccaccaagaagttgcctcttcatcactagcggatgtatatccatcttttgtgagcaatactctcttctcattaggacagtcacaccttcatatgtccccttcctccacacttgaaacattctatgtcactagaacggtcggtggactgcacacttgtatcagctctcgatgctcctaattttgacacatccttttgcacaaaaccattggatcgattcgacgatgccatcttggaactagtgccaacttcatcggatttttgttgaggatgtcgccatgagttagaagtggtgctatgaaaaacattagtttgacaccgcttaatttgttgctctgcacgcacagtttggtggacaagatcttgcatgttgtaataaaccaccatctctacatgatcttgcacctctatgtttagcccgttaaagaaacatgccatggtttcctccggatcctccgtcgtccctgtacgtattataagcaactccatctccttgtaatattcatcaacactcatattaccttgagagagccactgcatcttgttgtacatatctcttctatagtacgctcaggaacaaatcgccgcctcatgaattctttcatccctcgccaagccatcggacaatgtcatcaccggaaaatttgattccaccaaattaagcgtaatcagtgaaatcaattcaagcaagttgaactttcttctctttgctataatgatgggcataaaaaatttgatcaatgcgcatctcccactccaaatagacttctggttcgcacttgccggagaacgaaggaattgaaatttttatgtgtccaattccatcatccaaaggaacacgcgcagcttgaccaactcggtcatgcgctccgcctcgagcggcagcttcaggacagggctgaaagtgtcgcgtaccccgcctcatgatcaacatcgtcatcaaggtcatcatctctagcatgtggttgtgccgccaaacggagatcatgcacgacggcatgtccgtcgcgagccgctggtgcacaacgcatgggagcaactggagcagcctgtggtggtgcagaattagtcgtcgacgtattgatggtgtccgtcaaagcgtcgaaatgggcaatcagaacatcaatctttttgccaagcttcacctcgagcgtgtcatggcattgcttgacgtagttgcatgtgtggtcaaaatcatcacggatattttgaggaatatcatctgcatacactggacatacaatttcctctaaatcagcagcaacctcgccatctctattgaccgaggttgacaacttgatcaacacagcaccgtgaacaaccttagctctaaatgtcacttgataagactcgactagaagacgagtcgttggttagtccgatcttccatggtacttgtgaaaaaacaatgaacgacggtagcaatagtcgcagaagaaatagaagtagaagaaaagaaacctttggatcaaacgaacaaggtaagaagcaaatgagaagacttgcaccgaaactgatatgtgatcagacacaagcacagcagcaacgaatccctaggattcgcaagaacatatccttggtgcctcctgacgtgaggccttttctgttgtttttattcaacttgaaactaaaacaaatctgcccccgatacaaaagtgaatatgcctaatatataggctgacacaaaccagccgcaaacggcgtaccaaactctctaaccgactcgatcgcgtatactagctaaaaaacacaaggacacgttttctctcctagtactagtattttttaattataaatacactaattaatctttccggccatgttgattacgtaggacttgtttagaaaagaaggactttgcctaccgccgaacggagaaggcaccaacatccatttatcttggagtagccctcaagtttggtttgacagtatccttcttcggttcaactggtgtaatctcgaagttaaacgagccgatctgtaacacattggtaggtcatatcttgaatcctccagtatatttgcaactgaatatattgtcaagtgtgtcttttgttcagcacgtggagcagcgccaagtaaacctgctgagttttgcactggaaaaataagagagccattgttgggcacatcattaattttccatggtccccataaagtaaggctgccatggtccatatactaaattttccatggcccatatactaaatttgcaatgtgtatcaaattatttttgttagagaaggtgtaaaaacaatgtgaaatttccatgtgagaaactacaaaacatttcacataatggcaaaaaaataagaatgttgtttgcttggaaaaaagttgggaaatttaggaacttgccgcatgaaaaaatacaagaattttgttctcgaaaacatacggcaaatttatggatttgccaaaagggtgcgaaaagaaaattttgccacttgttcactaattgtcatgctatgcacaatacaaaatgccatggtagagactatagagaatttgtcatggtatctgaaataataacgacattgtaaaatacaatttttattgccatggccgaaatcaatagaaatgcctgtatttgccatgtgaacatggaaatcatacgacttgccacgcgacaaaaaaaatgccatgtgacaagtttcaaaattcaaaggtttgccatgtatgcattccaatgatttgtacaattttccatgttttggaaaagtaaagtattatgaatttgcaatgtgccagataagaatttaccatgttatgaacctgcacatagaaaatgcaaagattcccattctggagcgaacatttttaccagccaacggccatctaggtgttcgccccagatttttaacatttgggtatatcattgcgtaagagtagattcagagagtaaacatatgtgacaagcgtgctgtaattattcgggacaacgcagctacatatattaagttccagtttgcgcctctgcatgaatatagttctaatttgcacgagggcagacgacagtggttcacgaaacgcacactcgatcaagactagctaattataacaaagactagcacaccacacttgttgaagcatcgatcatccggaatttaactaatcaaaatgtttagggctaaaatctcggccgccggccggactagagtcacttggcgacggcgggcttgctgctgctgcaagccaatgcttatctgtccacggtgaccgagacgttgccggctccagcggggttgctggtgggcagctcgacgctcttctcctccttgggggttctcttgtagtagcagccgtagaggatgagctgcatgaggccgaagaaagcgccgaggccattggggatctgcatgcatgcatggcagttagatcgatgagacagaaaaatctagctagctgggtttaatcggtatacttgtttgagatgtgtatatgtatgtatgtatgtactgaccgtgacgtagaggtcgaacttgatgagcgcgtaggccaaccagcagcagccgttgaggaagttaaccagcgacagggtgaatggcatgtactccacactcttggtcttgatcaccttaccctgcaatcaagtattgcaatctaatcttagtagtacttacatcaccaggtaacaagagcacacgtacgtacgtaggtaattaacaaggctgactctcattgaatccctgatctaaatataatgagtaggtacacaaactcactggttaattagcatcataactcatagatttggcaagagtgaaggatcacaagaagcaaaagagaacatgcatcctcggtgcattggcacatacgtttgtgatgaagtgctggatcacatgtttttagtcatgtcatgaacggctcttccatgcgattgcggacccgtcactccaacagctaacacgagattttggcggccgggtgcaacagaaagtttggttggctggctatagctatttacacggcatgcaagtccagatccacaaggaaaggacacgcaggggttgcgttacctttgagcttttttgaccaaacatgtgcacacaaaacaacatcttgtgaaataacttggatgtctgaagtagatctacgtaaatcgaacagcatgcatcttctaaaataacttgggtgtgtgaagccagacccctacgtgaatctagccacaaaatacagaatatgtacacaaggcaacatcttgtctcgtaaaataatttgtgtgtggagagtacatctactgtgtgaggtgggcagcatgcattcatctagccactcaaagacacttgggcccaagagctagcagatccatgcatgcagattaaccacgcatgtcttctaaacaatgcatattatcactccatacgaccagaacggcatgcattaacacacaactaacaaagttcaaaacaaatgaaacgaaataaaataacagctgcgcctccagaattaagagcaaacggatcaatggcttaaagcatggatcaaagagtgcatgcatgcacacgtacgatcgatccatgaggaaggagggtgtaggtacgtaccatgatggtgagcggggaggcatacatgatggttccgaagatgacgcagaggatgccgacgatcatggagcgcttctcgtgggtgtgggcaccgaggagcacgccgagcacgacggccaccatgaacgccgcctcggcggcgagcacgcctatcatcttcagctgcaagcacggaggcacgcacgcacgggcatgggttagggccagatcttgttctatctagacgaaaaccaacgggcgaggggattagatttagggatgtggtagtacgtacccgcttgttgttggtggagtagaggaagaagatgatgaggtaggagccctcgatgacgagcccgatcccgttgatggtgacgacgaggatgctgttggggtggacgatggggaggccgtagaagacccagagcatgcagttgagcagcgtcgccaggtaggggtccggcttgaactcctccacgtccttggccttgatgatccgccagaaaaccggcctgcaacatccaccatccatgaatatagattactctagactgtctacaaaagaggcggcggattagaggaggggggatgggggcttacgtaggggagaggaagaggccgaaggagatgacattcccgatgataccgacgacgttgcgagctgcgtcggcggacaccatctcgctcgggtcgccggggcggaggagctgacgcgcttgaggaaggaggaagggttggttgtgggttgggggcgaatgggcgatcggggcagagggaggcggagcgtatataggcgcggcggcttcgccttcccaagttatcgttggaactgatctcagtcaaaacaaattaactaaaccgagagaaaagggcgggagggataagccttgatctctctctctctctctctctctctctctctaagttgccctgatctcaagggcgccctatgtctggcattgtaagcgagacaggagcgaaccccatgctgaacggaaccccggttgggccggctcacgcgcactggaaagaccagcctggtttctgttttgtttctttcacgtttttattttatttttttctttcttttttttgagagagaaatttccaatctattcatcaatcatgacagtacagagaacacaagaggtaataaaaattacaaccaggtctatggaccacctagcgacgactacaagcactggagcgagccgatggcgcgccaccgtcatcgcccctccatcatcggagccgggcaaaccttgttgtagtagacagttgggaagtcgttgtgctaaggtcccaaaggacgagcacaccagagcagcaaccatcgccgatgaagggagttgtagatcggaaaaatcaagcctgaaaccacacgaacgaagacgaacaaaaactggatccaaataaatccatcgaagaccaacaccggccaaatcccaggagatccgacggagacacacctccacacatcctttaacaacgctattcgcaccatcgggacggggatgggatgtgggagacattattgctaccaagagacatcgccgccgccacacagccccaaccaagacgttcagtctagcaaaaatgagaacagggtccctcccgccggcggggggccgagatcctccgcacctccacaggccaaatgccatcggaggcggggcggatccgcggcggtgccgacgggaggaggaagaagacttttctttgctgtgtggatacttatccttgtgagaggcctagtccatccgcaccttttatttttcttttgtttatactctaaaatattctaaatatatatattacacaaaacactcttcaaaaaatatttgaaagatcttgaacaaatattttgacaatgttgggcaagtatttgaaaaatgttgaacaagtatttcgaaaaatgttgatcatgtatataaaactgtttaacaaatatttgaaaaatactgaacaagtatttgagaaagaaaaaagtccattttactaccctgaataaagtgggtggttcactttacctcctgatcttattttcagcttcttccaccccctaaacaaaccaaaaccagacacacacaaaaaccctggccggtttgtcttcacccgcggctgatgtggcagtggtcaacggtggttttgactcggtggggccctcttgtcaggtcgggctggatagagatgcggcgcaggttcgattcgaaccaaaaaaatccccagccctctcccctctctgtcgccgttgctggccctgtcgaggcagcggtgatctaaggtgagcaaggctggtcggagtgctgttggcggctacggcagtggtgcatccgacgaatctttcccgaggtgttgcttctcccacggccgctgtcctgccgccttcctcaaaccctagttcgatgcctccgtcgacggggcggcgaccgatgttgtagggaggggtcagactggttccgcggcggcgcagacgaactgaggtgagtcccatccccttcccgctctacttgctgcagttgctatagttgttatctgctctagttgctgtagaaagtagaaaaagctcatgtctttaggttctaattgtccattgcttgctgtaggttaagcaatggatgagctagattggttaggcattcatttcttttacaatggccaatttgagaagtcaaggaagtgtgtgtcatatgttggtggtcatatacaagtcacacaaattcatagggacattgttaccatagcaactgtcagggatcagcttgcagacataatgatggcttatcatgttcaagagcttactgacaatcacaggctgtactggttgtttcctggaaaaaatgttagagatgggcggagaaggtcggacactgatgctaatgtgcatttcatggacaggtgcattacagatggtggtgttgtggatgtatatgtgaattatgaagataatggtgctgaagatggacaggacagtgggtctgaaagtggagaagagaaggaacaaaatgatgtttcaaatgcagaagaagatagggcagaagagaacactgacattgattgggaggatgagcatgaaaattgctctgttgaggaggacctggagcatgaaagtggagaagagaaggaacaaaatgatgttcctttagtggatgttgcacaagatgaaatcagtgatgaatgtgaagatctagattggtgccctagagatgaagacagtgatgggaatcgtagcataattttaaaattttcctacgctcaccaagatgcatctatggagtgtactagcaacgaggggaaaggagtgcatctacatacccttgtagatcgcgagcggaagcgtttcaatgaacgtggatgacggagtcgtactcgccgtgatccaaatcaccgatgaccgagtgccgaacggacggcacctccgcgttcaacacacgtacggtgcagcaacgtctcctccttcttgatccagcaagggggaaggagaggttgatggagatccagcaacacgacggcgtggtggtggatgtagcgggtctccggcagggcttcgccgagcttctgcgagagagagagagagaggtgttgcaggggaggagggaggagcccaaagctgtaggttgctgccctccctccccccctttatataggccccctgggggggcgccggcccagggagatgggatctccaagggggggcggcggccaaagggggggaaggggtgccttgccccccaaggcaaaggggaaactccccctagggttcccaaccctaggcgcatggggggaggcccaaggggggcgccccagcccactaagggctggtgcccttccactttcagcccacggggctctccgggatgggtggccccacccggtggacctccgggacccttccggtggtcccggtacaataccggtaacccccgaaactttcccggtggccgaaactggacttcctatatataattcttcacctccggaccattccgcaacctctcgcgacgtccgggatctcatccgggactccgaacaactttcgggtttccgcatacatatatctctacaaccctagcgtcaccggaccttaagtgtgtagaccctacgggttcgggagacatgcagacatgaccgagacgcctctccggtcaataaccaacagcgggatctggatacccatgttggctcccacnacggatggcacctccgcgttcaacacacgtacggtgcagcgacgtctcctccttcttgatccagcaagggggaaggagaggttgatggagatccagcagcacgacggcgtggtggtggatgtagcgggatgccggcagggcttcgccgagcatatacgagagagagagagaggtgttgcagggggacagggaggcgcccaaggctgtgatattgctgccctcccttccccccccctttatataggcccccttgggaggggggcgccggccaaacccatctagggtgggggggcggcggccagggggtgccttgccccccaaggcaagtgggaacccccccccaccctagggttcccaaccctaggcgcatggggggaggcccatgggggggcgcccagcccactaggggctggttcccttcccacttcagcccacggggccctccgggataggtggccccacccggtggtcccggtacaataccggtaacccccgaaactttcccggtggccgaaacttgacttcctatatatnnnnnnnnnnnnnnnnnnnnnnnnnnnnnnnnnnnnnnnnnnnnnnnnnnnnnnnnnnnnnnnnnnnnnnnnnnnnnnnnnnnnnnnnnnnnnnnnnnnnnnnnnnnnnnnnnnnnnnnnnnnnnnnnnnnnnnnnnnnnnnnnnnnnnnnnnnnnnnnnnnnnnnnnnnnnnnnnnnnnnnnnnnnnnnnnnnnnnnnnnnnnnnnnnnnnnnnnnnnnnnnnnnnnnnnnnnnnnnnnnnnnnnnnnnnnnnnnnnnnnnnnnnnnnnnnnnnngtcaatcggtatgttacttgcccgagattcgatcgtcggtatcccaataccttgttcaatctcgttaccggcaagtctctttactcgtaccgcaatgcatgatcccgtgactaacgccttagtcacatattatgatgatgcattaccgagtgggcccagagatacctctccgtcacacggagtgacaaatcccagtctcgatccgtgccaacccaacagacactttcggagatacccgtagtgcacctttatagtcacccagttacgttatgacgtttgcatacccaaagcactcctacggtatccgggagttgcacgatctcatggtctaaggaaaagatacttgacattggaaaagctctagcaaacgaaactacacgatcttttatgctatgcttaggattgggtcttgtccatcacatcattctcctaatgatgtgatcccgttatcaatgacatccaatgtccatagtcaggntcaggaaaccatgactatctgttgatcaacgagctagtcaactagaggcttactagggacacgttgtggtctatgtattcacacatgtattacgatttccggacaatacaattataccatgaacaatagacaattaccatgaacaaagaaatataataataaccatttattattgcctctagggcatatttccaataagatgttcgtttaattcttatagttcatttcattcaaaatcatctagtttttataagaaagctaatctattttaagattcatggaattgtgcgttgtaaggcataaagtaaaaacaaatcatgtagaaaaacatttgggcaattctgatacggaagattctagaacaaaaagaagtgcttgtgttttgaggtttgtgcattatgcttaaattcaaccatagagtcttctagattgtacatgtggcaaaatctggtggaatctagatgatatccaacggccaatagtgctcaaatttgccagctctgcaccatcggattggcctcatccaacgaccatctttcaaagttaaagttatctgcacactatataaaaaatataaaatatatatataggggtatagatatagatatgtgatgcgaaagccaccacatcatctccaattagaatagtgtgtccatgcacagatgcaatgtggccaaacgatgtctgccatcggtatctcaaattcaaaccaatctgaccttgttcaatgtgtatacattgcaacatgctcgtttccaaaccacaccgcgtagatctccgttatattcatgcatgcatgggtttcaaacatcatgatctcttattcaaatatttgaattcaactttacattgattatgacctcacctagtattttacacccacacattgnattttacacccacacattggtcttctctttataattgtaccactaactttctctcgtgcatgcatgcacacacactaccagtcggcattatccatcgcacacatgcaatatttttcttcaggtcggtcgcccatgaaggcgcgcacacacacacacatccccctctccatcatatcgggcattctttatctctcacgtacatgtgcaacgatcgatgttcctctatgtgtgtgtgtatatagctaggtatttcaaagttttccacataaaccgatcaatctatatatctagtgaggtctcaccctctttcccacgtccacatcgatcaatctatacctctctatataggattacatatatagctaatacacccacattaattatatatccaatgcccccctctcatcatccatgccttccgcttcatctctcagacgcacgcacaatggcgaagacagggggcagcaagggccctgccccccctaacatcactatatatcgaggctaatatgaatgtgatcattagacaattgctggtaaaaatggtttaagttgatgaattggccctcctcgtaaaggattagcaatgcttggccccctagctcatggaacatttttcatggctccgccactgcgcgcaacagcgcatgttctcgccccctctctctaaatatcgatctcgcagttgtgcactccttcatagtctccctccactcggcccctcgcaccatcttctagccccccaccggattttgccacatgtacaatctagcagactccatggtgtaacttaagcataatgcacaaatctcaaaacaacagtggttctcctttgttctagaatcttccgtatcataactgcccaaactttttttctagttgaattgccattatttgtttttagtttatgctttacaacgcacaattccatgactcataaaatatattaagggcttctttgattcaaaggattctcgaaggaattttggaggattctaatccttaggatttttcctatcttggttgtttgattcgtaggattgtaaaccataggaatttttccatatggttcatttgcactagatttcataggaaacatcccatccactcaaacctctttgaaagaattttgcgttttttctatgcacaatcaaacactcgtaccatcatgtaggattcaagacaacattccactctaatcccatgttcttcctattcccgcgttttggaaatccttcgaatcaaagaggccctaggttttctataaaaactaattgattttgaatgagatgaactataagaattaaacaaaggtctacatcatgcatatatgactcagagcttacatgctacagtgtggtatttattcgtaatttggttgcaaaatctgacgcgtgcaatgcacgtgtaccttactagtacttagagtatgtgcaaaacacaatggcacgctacacagtgtctctcttacagttcatgaagccacgtggcacatgtggaggcgttgtcgcgacatccttgtgtggattgatcacagtgacgtgctactagttctagaagaatgtactcgtcctccctgagccgcactggcagtacatgcatgaagcgaagatgtgcacgcatgcaacgcacgcactcattccctcgcacgcacatgcgggtacacgggcggacacaattttgtaccaagatccaccccatgtgataatttgacgcgtgtaaagtccttcacttcattgatggtcaattaatacagtgcatgcaaattgagtagacgtgagggcggaagaaagacattactactccactgcgcgcatgcgagtagttaaatcatgggttgctagtagtacttccattggtctcctttgtattttgtgtcaatttttgacagtaacataatatttatgcatctgagcagtgtagtctacttgaaatttatgttccactaaactcatcgggagtcgtttcgggcctcgaaacaaaaaaccatcaattcatctttaacgtgttcccatcacattcaaaagtactagtgctacaattaagtgcaagcctgctcacacccaccaatacgtaccaaacctgaacgtgttcccactatgcaggttttagtactagtgctagtacttaggttataaaaaggggaactacctaaccgaaaattactctaccttcctcctcataagtcctccttcttcgtccgtccttgccatggccggtgtgcagagctctaggtcgagaactactcgtaacaagggagcggcaacca

SEQ ID NO: 18 - DNA, 19991 bp, Triticum aestivum
  misc_difference 1163..1181: note = a, c, t or g
  source 1..19991: mol_type = unassigned DNA
tgtttctatggaatggcgacggcaccaatgggggagggcgacggcagcgggagcgaggaggagggggaagaagaatgggggagggcgacggcagcgggagctaggaggagggggaagaagaatgggggagggcgacggcgacgggagcgaggagggggaaaagagacgaatgcgggagtggatgactaaagacgagcccgaacggcgccgtctaacggctgccgggacggcctggagtgccacgtacgcgaaaaacgggccccacctgtcataaactcacttaactcagcccgatccgccgatcagtggtttttgcaaaacaattacgcaagacgtggtgctttctgcagagaatctgtatcctagtgtttttcgcaaaccgagccctcaaagtggtggttttatgcaatttactccctgccacaagacaataatcctttctcccctctttctcaatgatttccaacccgcaccccaccaactcacacgggatactaccatctcactgacacagggcctcgatgggcagcaaaggagaattagtggagtccgtaattcttcctccacacaaatacgtactctacctgtagtgttaaaagctgtgggacatatacgtcagtctaactttgactgtcaggtaaggtgcttggaaggtgataaagggtagttttggggtccaacggcccgccactacgctcggcccactgcccagagagagaaacgtgttctcggggaggcggggagagagggagctagcatttccaccgccttcaccctccgatcgcgccagcgtgtcccccctcgccctagggaaggcaggctgggccgtcggatccgggtataagtagcgacgcgcacgcgggccgtgcctattcctgtacttgccgccccgaccacctcccccgtttggttccaccattccattccagcgcaggacggcgggacgcgcgaggcggaggcggaaggaagcggagcgcgctcgcgctagggttcgtccgctccctctccccctctctgttccggccgaatcgaccgaccctagctggctagcgctgacccgctgcgccgaatgcaggcggaagcccccgagatcgcgaggtggtggaggcggagatgacggcgccgcgcggtggcggggatgtgccatcgtcgacggcgtcggnnnnnnnnnnnnnnnnnnngagcccaacacgccgacgtcggcgcacgcgtcggggctcaaccggcgggggtcgaggggcgccgccatggcctccttctccatggaggtcttcgacaacgaggtggtgccgtcctcgctcagcagcatcgcccccatcctgcgcgtcgccgccgagatcgagcacgagcgcccccgcgtcgcctacctctgtaagttcgttgcacttcgaagccgtctccgcgcccgcgcgtgcctgttttgggagattttcgacgccttttcctggcacagctcggcgcatttggtgtctcggtcggacgaaacgggcaactcgtgatgatatgtttggcgattcacagccgttgtagtgtttatttgggaaggttttgtgctcacgaatctcggaaaatacatgccgcgtgcgtcggttgttgttgtttttgtttctgggctgctttgattgttacgagtttattaaggggcatgtctgagatttctccgcgtatgttggttttgctgcgttagctggatcttcggctttgatatgtttctccttactcgtgaagctgatcttagaagtagctagcttctctcctgtatgctgcaccatgaggtgttcgtattcctatatgatcgtatcgacgagatggcttgtgtttgagagcgcagattagatttagttgatgcaacttccagattccaacgttctccctcgattgtgttgcttttgcttgaatttggtatctatttaatacttgctggttatgtttgaatcattaatttaggctaggatagtgctgcgcgatcagtttgcttggaaagttggaataccatatatcaggtagctcgtgtaggttcttcggtgtctctatgtgagatttctccgcctatgtcgatctagctgtacatgctgcgctagattttggatttagtgtgttttctccttttttcagtagctaattttgtcgcaggttagcttctgtatgcttgcattattcgtaccaaaccaaatcactactgtttttcgaagtgcagagccgcagatttgattcattttatggcttttccgacagttctccctagctcgttttgattgaatatgggcgctctctgtgttgtttgaatcatgtcagatatgacagttttgctccaccagcttttctctgaagaagtgcatatcacgtagcatgaatgggtgcttctggttcgcccttttttcgggatctcacgttgatctgttactctgtgaactaggtcggttctatgccttcgagaaggcgcacaggctggatcaaaactctgttggtcgtggcgtccggcagttcaaaacgtccctgcttcagcgcttagagaaggtgtgagacatctttctgtctcttcccctccataatttctgcatgatctagctgacttggcgtacatgagggtttgttttgttagttgatacatgtcgacttgatcatgttccctcgctggttttgactgggtcactgtatctggccttcatagatatattatgcaagttgttgaattattattactaccatcttagctttttaactgcttgcaggatatatataggtaatatagagtatgagtttgtttggctaataagcctcatggagttaaaaataagctggaagctaatatggacgactctaccttaatttagttgtcaaaatgtagtagtggtgcaagttatgttgtccaaatgctcagataaaccaaagggaaataggcaacatatgcacatgcagtttaagccatgaaagtatttcctacttttcatttttgtgttgtaatatatatcttgcagatacacgatttttaacttcaagagtatggtcgctggactttagttcagtacacatttgtttcatgataagcttaccaactccatctccaaatacatgacgtagaaagcatgtagtcaaacttctctacgtttgaccattaatcaaatcaaattatttagtttttttggatagaaattataccattgattcagaacagtttcactatatatctttttacttatatatgttgttcattgaagactcaaaatgcaaaacattatctatcttagaacggtgggagtatatttgattattagtgataagttgataactgtcgataatcaatctggaaattttattgtgattatcctatttgatgaccatattgggagttgtgatcagccaagcaaacctgcaagctcacttaatcctacctaacagataaagaacactgttctagtaatagaatggtgtgcttcgttttattgtgattatcttaatttttaaccatattgggagttgtgatcagccaagcaaacctacaagctcacttgatcctgcctgatagataaagaacattgttccagtaatagaatgttgtgcttcgttctacttattttgtttcaaagtcacaactaaaccttcagttcagattcaacatttatttcgtgtttctgctggggagggggatgaggtaaaatgacttcagattacaccatcctcctcatgattcgtctcaattgatcagtttgcaatggcagattcttgtttgttagagatataatgaggtagccacattctcatctgagcttattttttcagatgatccagttcaaatttaccacttttttgtttcctacttgaaatggccagcgaatgtagtagaatggggaaaaggagcagggacttagggttcccttgttttcttaaatcggattttgcctaacctactcttgaatccaaagatcctgccttaaaatttcccatttcgatcccacgcaatccaacaggataatagcccgagtctcgcaaagcgattgaagaaaactgatgcccgcgaaattgagagtttctatcaagaatactatgagaactatgtccgcaccctcgacaaaggggaacaagccgacaggtaattcccaatccctaacctatactgcgatctcccctataagtccaatccctcgctatcacgaatccggtcccatgacattgtcgcctccaggactcaacttgggaaggcctaccaaacggctggagtcctcttcgaggtgctctgtgccgtcaacaagaatgagaaggttgagcaagttaaccccgaggtttgtgctcactccagccaactgtcgtcgttctttctcagtagaaatctaggttccctctaatgcatcaagtttttccaaatttcctctgcacagattatgcgctggcacactgaggtgcaagaaaagaaagacatctacgcgccgttcaatattctgcctctcgatgcggccagtgcatcccagtccatcatgcagctggaggaggtatacgacttacaacaatgcagcctatttcctcaaaacaggaacaattgcattatgtactggttcaattaaagaaactgacgtggtcatcgaatgcatcattaacagataaaagcagcagtcgcagctctgcggtacacacggggtttgacctggccttctgcatttgagccggaaaggcagaaggggggtgagctcgatttgctcgattggttgagagctatgtttggctttcaggtctgctacccactccaggcaaaccaatttcgattggtccattgtattactataagctaacactagcttatcttcttgtgtgcagcgggacagtgtcaggaatcaacgggagcatttgattcttctcctcgctaatgtgcacattagacttgagccaaagcctgaaccacttagcaaggcacactcttctatcaatatttactttgacagcttgactttatgaatatcaattgataagcataagatcaatgggttttgcatgcataaaaatgtggtggtagcttctgacagaacaggatatttgcctgagtttctaatattttaaaaaaataaagttatttttcattggattagtaaccaattatttaccttcaacgttatgttgtgattgttggtgtaacttgccataacatacacatgcagtttaatttctttcttgatactactattttttatttccatattcttgacattagaatttgctggactggtgccactacttgcaaaaatgccagctgacttattggctttccaccacgaattcgattgattgaactttctgtatgcattattctgaagcaagtgcgtagctaaataatgttaattacaccctccatttcccatgctttgcttctctcctttttgttcatcgttgcttgatgattgatctcatccgttctttcacccctgaaacagctagatgaccgagctgttgatgtagtgatgaacaagttgttcaacaactacaagaagtggtgcaaatttttgtcacggaaacatagtttgaggtatataattccttaatcagtttcctctttatgtacattattgtgctgataatcttgcaactgcagaaatcctccaggtgctcaattacaggaagttcagcaacgcagaattttgtacctaggtctttatcttcttatctggggcgaatcagcaaatatccggtttatgccagagtgtctttgctacatttttcacaatgtaatttgcacattcttattatcatatcaagtaccaaatctcattgcaaaaatatatctttgaatgattcttctcaatgtgttcagatggcatatgagttgcatgggttgcttgctggaaatgttagtattgtgactggtgaaaatatcaggccatcttatggtggggatgaggaggctttcttaaagaaagtggtcacacctatctatcgtgtcatcagaaaggtactttgataaattaccattacctgaaattccaagttagtttgttctaaatataattgtggtggtttttcaggaggcaggaaaaagccaacatggaaaaactgcacattcagcatggtgtaattatgatgatctaaatgagtacttctggtctgtttacagccctattttctggtcacatgctgacagccttttcacactttctctgatagatcctactctgtttcaggacacctgattgtttctcactgggatggccaatgcgagatgatggtgacttcttcaaatccgtgcacgattcaaggcctgtagcagtggtacagttcgatataagtctgtcagtatctcttccaaagactttgattaggaggagaatactgacaaataactatttgtaggctggaagctcctcaccaaagggttctagtaaaggcacaggcaagacaaattttgtagagacaagatcgttttggcacatctttcgtagttttgaccgaatgtggaccttctatttgttggctctacaggtactgtgccaaaattttcgattggcttttttctctgtactatggtttttgatggtttgacactctgtgaatcttataatttttaaaccgaacaggcaatgttgatttttgcttggagtgaatattcagtgactcaaatccttcagaaggacctcttatattctctatcaagcatatttgtcacagcagcatttttacagttcctccaaagtatgtttcccatttcaaatacttgttttatgtacaaggcatttttctgatgcatgtaatatttccttttattttttgagaacctgaaatttttagtatgacaagtgatgaatattggcataatttagttccctttatgtatgtaataccttctgcttttgtcaatggcattacggtaagactatgttaagctaggttcccgcgatacagagcactttcacagcagaaagcaactggcaagaacattcatgtagatatctgcaactttaggatctcttctcatatgcattaaactagtgttactataccgagcagtcatgttcttgagatgctctctggtctggaattcttgtggttttaagagggttctggtgcaataacaaattcgtcatccaactgaaactgatattttctttaattttgatggcaggtattttagactttattctgaactttcctggccacattagatgcaagttcattgacgtcgtgagaaatattctgaagatagtagttagtgccgcgtgggctgtgattcttcccattttctatatcagaagtcaaacaaaagtcaatttaccactgaaaaatctggacagatggtttggttatgtgaaaggagtgccacaactatatatcctggctgtggcggtgtacctgatacctaatatgattagtgcaacgctcttcctgtttccgatgtttcgaaggtggatagagagctcggattggcatattgttagactgctactgtggtggtctcaggtattgaattcaatctattttatttgtttatgttctattatgtggaaaattacttatgcagcttatcctcattgtaaatattcatttcaaaatttctgctatgaggcaatttttaataaggtaatatttgataaaatggaactgtattttgtagaatgaatttgtcttgatatccttgccagcttattgtttgtcatagtatcctagagggttgagaaactactgataaaattgtaaactgtaacttgcaaaaagagaaaataatccaatgacttctgatgccagggcagagattatcctgctattttgtcattagtttgaaaaaaacattttatggttagttaaaaagttctcacatgcttgtgaaaattgatagttttcacttctctaacaatatgtgttcaactgaacacatttgctatcccagtaatgaaaatgatattgcaagggtacatatgcacgaaacagggtggaaaacgtgaaggcaatagattattttgtatgcaatgcgtggaagtaaaataactggatgaatttccctggatcataaggcgctgtacatttattcgtttttcatatttctttcttgtgcggcttgctacactacactacactaatggcaatgcccattttccttgttcttgctgtacacgctaattgtataaataactgcagaaacgaatttatgttggccgtggaatgcatgaaagtcaagctgctcttctgaagtaagttactctgttctatttttcttctgttagagctttattctgcagaaaacactcaattctcttctattcaactgagaaggtacacattattttggattttgctgctatgcgcgaagctttccttcagttactttgtccaggtaagttctatgcttagttatttgcaaacatgctttgacgagattaatctgaaacagtttaatttgcagatacaacctcttataaggcctaccaaggatataatgagtgttcataacattcgttatgagtggcatgagttttttccaaacggtaattccaatgctttttttttttgtgccgccttcattctggaaccctttttttactgatacttcgttgccttttcagcatcatataatatcgctgctatcctatccctctgggcccctgttctgttggtatgcacttatccagcctgctagtgtagtgcctatccagcttatgtattagctgaaaagtagcttcatttattcccgtttgtttcaaaactgcattctaaatcttggtttatcaactacaatgcttttattcttgtaggtctatttgatggatacacagatatggtatgccattttctctacaatatccggcggtatgtctggggcacttggacgacttggggaggtaatgataaatctgaactattctctgtaatctgttgttttgctttataatttagaacttataatgaccataagtgtagggcaccccaagattgatggatagctaaggggctttttctttatattgaggagtaaactgaacgtgtcgaggtctcagtcaattgcatgaaacaaatagctcgtactttataaacataacggcgggctatgtagatggtaatacagttttatgcagaatattttgtttgaggaagcttagcgaggtattttaataagtgaaaatcaccttttttgtttttgcagcctgagaattcagaataaactacattagattataatggtaattttaagtagataaatatggaagtgtattcacaaggcaaatgggatattcatttttaggaggatcctctgggagtcgcacttcagtcttgtttctgttatgctgccgtatttacaagaaaacctttttcatattcatgaaatgaagcaaaaaatgtattgctggtggcttggtgtatttatagtcggatattctcctttttaaccgtcgacatttttgtattagcactgccttttttactttgttattgccgtacagcgttgtgtaactttttctttttgcaagagttaagaagctgaacttcatactgttctggtttctgatggagttactacactcttgtaccagattcgaacactaggaatgctgagatcacgatttcactctttgcctggagccttcaatacatatttggtgccatcagacaaaggcagaaacagacgtttttcactctcaaagcgcttcgcagaggtaccaaatgacaataacgaaaattattgtcaagatttctcttataaccccccttaaaagttatgatataatgaagaatttaaagtacaggtttcccccaacaagagaactgaagctgccaagtttgctcaactgtggaatgaagtgatttgcagtttccgcgacgaagattttataagtgataagtgaggcccttagatcatgttcacctagaaaacattatcattgcaatgtagataatggaccttctgttatgcagggagatggacctattggtggttccatactcatcagacccgagcctaaaattgatgcagtggccgttgttcttgcttgctagcaaggtttggcagaacaaatttaatatgtccactctaccttgttacatgtttgtgttcggctcttactggaaatcattttgattgaaatttgcagatacctatagctttagacatggcagcacaatttagaccgagagacagtgatttgtggaagcgtatatgtgctgacgagtatatgaagtgcgctgtaattgaatgctacgagtcattcaaacttgttcttaatttagtggtggttggagaaaatgaaaagaggtatcttcttatacttccattttccactgtttcacgtatctctatgtgagaaagacattgatgttgtttgtcatagcttttaggtattcagttaatgataacactaggaaatactccctccgtcccaaaattcttgtcttagatttgtctagatacggatgtatctaacactaaaatgtaactagatacatccgtatttagacaaatctaagacacgaattttgggatggagggagtatatacttacatccggaatagacattgtgcactatttttcttcaaaaaaatcgttactagtactccctccgttcggaattacttgtcgcggaaatggatgtatttagacgtattttagttctagatacatccatttccgagacaagtaattccgaacggagggagtacctagtaggtttctatgattgtctaaggctcctctgttgacgaatccttgccacttttgagcaagacagggccacccaggaaatcatttgtttcgttccaatatgataaaatcattcttaccataaactgggaaacacgcaggtcagcacaagtatttttgaacatataaagtggtcagacatggctgaatatttgtagtttgaacatgcacgttttcattcgtagtagttgatgcaaaagatcaatacaaatatattactaaaaatctacaaccctatatgataatggggtttgagagttcaagattacaaatacattacttttaccaataaatatatatctggctagttgcgtatggcggcacatcatcactttcaaacttaagaatcaagatattccaaattgaactagggaggaggactgccaagcacctccattgtgcaatatgcatggaagggaaaccatgattagttgtaactgctaaatgtgcaacatgtgttagataggcagccttagtactattgaaggcatctgtgtccatctttcatgttttttttactgcattgttctttatcattgcatgctcactgttatcttgatcttctactgacatgtttgttcactaacttcaacaggattattgggattataatcaaagagattgaagctaacatcgcaaagaatacattccttgccaattttaggatgagcgcattgccagtcctttgcaagaagtttgtggagcttgtatccaccttggtaagcaatgttgttacctctactgaacaccaaccctattgaagattgcattgcttgatatttttttagacaagtaacacgttcgattattgctacgattatgtgatcacatctgcagaaagaaagagacgcctcaaaatttgataatgtagtgctattgcttcaagacatgctggaagtgatcacgagggatatgatggtcaatgagatcaagtaataccttttgcacaaattataatcatacatgtgccttgtcatagaaactggtgactattttttttaacatgtgttgtttacagagaactagctgaatttggtcatgggaacaaggatttagttccaagaagacaactttttgcgggcacaggcacaaaacctgcaattgttttcccaccaccaatttctgcgcagtgggaagaacaagtaataacatcacattcttatttggcttttgtaacaaagaaggttcactaacttcacctatctacagattaagcgcttgtaccttcttttgactgttaaagaatcagcaatggatgtgcctacaaatcttgaagcccgccggagaatatcatttttcactaattcgctattcatggagatgccacgtgcgcctagagtgcgcaaaatgctctctttcaggtttgtctcgtatgtaaactttcaacatatcacagtgttgtccagtccacttttctaaatacaccgcagtatcgaaaatcataatgtctagctaaattagctggattcattggagcctggcagctactggctaatggtccttttactgtgcttcttaaaaagaattatatctgcttgtcaagatatattttgggctgaattatggtatgttcttaactctgatcagtttgaaagaacagaaaacatgaatatttttgggcgtggaattgtgaatttgtgctagtcaggaaagaggaaagcaccattaagaccaaggagaagcttatcaatgttgggattttaactgatttttttgctgtttgatgaactcgtattctgaactaaatggcggggtggtttctaattttcacggtcagttgtttaggatttttttattacaggttattttgatcactgccatcctcatcgtagtcttaaaaaacttcttgctgtcatttgatgtgttgtttaagctaaaaatggaagtatgagtgtcctgatgccattatgtggtattgagttgcttttgaaactgtctttgagtctgccactctcattgtctcagcagatttgcatgccccttctcggtattaactacagagtcggagttttgtgtcttgaccagttaacccaatggcgccatgatcatactagaaccgaagttcatctacagttttgatcagaattcatttaaagttgcattatattacaactgattctgtactcatcagctcatgttcgcttgatggtaaacaaaatttataaacagaagtgttgaacatccacaatgtctggcagtggcactctgtaatcttgttacttgtacaagtacatatgtttccaccttaaaggaaaaatgcacctagatattctaaaaaaataacaagtggtgaacttccaggtggagacctgtacaacagaatgtgtgcgacccatctttaagtgcattcataatcacaaatcaacaacgttaacaccagaaatatattatcagttcacaacaacaaatatctgataaaccgtatggttaaatttgttctgtgatcataagagtttcagcgaaaaagattgggctctagatgattcatatgacacttgttcttcacagtgtaatgacaccatactacagtgaggaaactgtatattcaagaaacgaccttgatctggagaatgaggatggtgtatcaattatattctacctgcagaagatctttccaggttcctttcctatttgatgtgtttaatgcctacagttctttatgaatttgattgccagctttttgtcttctattcttgataatttttgttatatagatgaatgggataatttcatggaaaggattgattgcaaaaaagaaactgaagtttggggaaatgaagaaaatgttcttcaacttcgtcattgggcctctcttagagggcagacactctgtcgaacaggtacttcggccataccctttaaccttgtcaaatatggatcatttagctgattccgtgtttacatgtttttcttattgtgaatagtgagaggcatgatgtattacaggaaagctttgaagcttcaagcattcctagacatggcttctgaatctggtgagcttcttcaacttccaattcgagcattcctagacatgatgcatttagcattcctagacatgttcacaaatataagatgttttggatatttcaatatggactacatgtggactgaaatgagtgaacaaacacagtaagcttctattaataaagttagaacatcttatatttgtgaacggagagggtaccttttacaaatacttcctgattttatattgtagaactaggggagcatccgcaataggtgcaaaaagggggagtttttttcatgagaagagaactaggtctacatattatagcatctttttagaagttagacccaatcttattggacacttggaaggggtctatgcactgaggatgttctagaaggctataggggacttatacaaagtgtccaacatcaccctcttttgtttgcagagatactagaaggctataaagccattgcagatcccgcagaggaagagaagaaaagccaaagatctctgtcttctcagcttgaagctatagcagacatgaaattcacatatgttgctacgtgccagatctatggaaatcagaaacagtcgggtgatcgacatgcaacagatatactgaacttgatggtgcagtaagtgatctcgatgatctattctagaaattaatatacaacatttggccaagtgcgatacatcatgtctaccacaatgagcaaaatgttttcttgtataactctttggagactgtgtgtctcggttatgtttatatttagttcacatttaattgataatgagatgttccttgagggaaaattactgaattgcttcttttattcaaattgttatttccctctgtgcaaagtaatttcagttagaatttgaaactacagttatcctggtctccgcgtggcatacattgatgaagttgaggagagggatggtgagaaggtgcaaaaggtcttctattcggtgctagtaaaagctcttgacaatcacgatcaggtaatcattttacgtgaagcgagttcaaactttcattttggttctgatttaaaccttcaatactcagtagtgcgttatgtacttttttgtcctgtgaaggaaatataccgcataaaattgccagggccagcgaaattaggtgaagggaaacctgaaaaccaaaatcacgcgatcatttttacccgcggagaagctttgcaaaccattgatatgaaccaggtgaacttcatggttatagtacctttttggtaagtaggttgcattctgtcttttgtacttatcaatgctgtttaggacaattatttggaggaagctttgaaaatgcggaatttgctggaagaattcaatgagaaccatggtattcgtcctccaacaattcttggagtacgtgaacacatattcaccggaaggtgtgttttaagctttgcagtaggttttacttagttttctttgtcaaaattgcaaatcaatgcctaacatctgacattgctggattgtagtgtgtcatctcttgcctggtttatgtcaaaccaggaaaccagctttgtgacaataggacagagggttcttgccaatccattgaagtaagtctgaatatactttgatatgtcctatttgaattaagcgcaatccatagttatcatatttatatgctgcaatatgagtagggagtgctgagcatctatggtgactatctcctggatgagcgcttatgtttttttttatcagctcttgaaatgcacacacatgtttgttggagattttagaggcagtaaggcaataaatattaaaacaaccaagtgctatttcctggaactttcctggcataaaatcttttgaagctaaacaatgtcatcaatttaaagtgtatattgtggtctaagtgctgtatatctgacatgctgtttcctgaaactttcctggcatcaaagcttttcaagctaaacaacgtcgccaatttaaagggtgtattattgtgtatgtgctgtatatctgacatgctgtttcctgtcagtaaagcttttcgagctaaaaaatgtcgtcaatttaaaatgtgtattatatctactccctccgttcctaaatataagtctttggagagattccactatgaatcacatacggatgtatgtagatgcattttagaatgtagattcatccattttgctccgtatgtagtccatagtggaatctctacaaagacttatatttaggaacggagggagtaagtgataaatatctgacatgctgtttcctgaaactttcctggctgagcttttcaagctaaacaatgttgttaatttaaagtgtgtggtatggtcattggtcattgctatgtatctgacattctcttttctgggcagggtacgttttcactatggacatcctgatgtgtttgataggatatttcacattacaagaggtggaattagcaaggcttcctgtggtataaacttgagtgaagacatttttgctggtatgtacttttccacctattctaactgttacctgtggatttttgagggaaatttaagaatggataggtccctaggacatccacatcctcgtatatgtgactcaaactgggtttgacaactgattcacacatgggccattatatgggcctcagacagactactctaaacttgattaagacactgatgctactcttatctaacacattaactcacattccaacatttcccatttctgctcttggacaacacaaacttaaattttctttttcaggtttcaactcaactctgaggcgaggaaatgtcacccatcacgagtacattcaagtcggaaaaggacgtgatgttgggttgaatcaaatttcactctttgaggccaaagtggcgtgtggcaatggagaacaagtgcttagcagagatatctaccgtttgggccaccgctttgacttcttccgaatgctctcatgttacttcacaactgtgggattttatgtcagctcaatggtacaaaacatctacctgcatcacatttgtcttgatttgccatcgtccatgttttttgatgttcttattactgtgcagatggttgtcataatagtatatgttttcttgtatgggaggctttatttagccttaagtggacttgagtttgcaattatgaagcaagcacgaatgagaggcaaccgtgctcttgaggcagccatggggtcccaatctattgtgcagctaggtctattgatggccttacccatgtttatggagatcggactggaaaggggttttagaagcgccctgggggatttcatcatcatgcagctacagctatgtgcagtattctttaccttttccctcgggacaaaatcacattattttggccgcacaatcctccacggtggtgcaaaatatagagcaactggcagaggctttgttgttcgccatgtaaagttcgctgaaaattacagaatgtatagcaggagtcactttgtgaaaggacttgagctcatgttactacttgtagtgtatgagctctatggtgatgtggcgacagattccacggcctatgttcttctgacatcatctatgtggttcttggtaatcacatggctgtttgctccattcctcttcaacccatcaggatttgaatggcaaaaggtggtggatgattgggatgattggaacaaatggataagcagccgtggcgggattggtgtgccggccaataaggcctgggagtcgtggtgggaagaggagcaggaacatctgctgtcaacaggcataatcggccgcatatgggaaatcatattatctctccgattcttcatgtttcagtacggtatcatgtaccatctgaatatctctaatggcaacaaaagcatatcagtaagtcatcctttatttttgctagtattttacaactctactcgaactaaatggatttcatgagactgattacatgatctttttgattgtttataatcactgtttactgatacaatttagtgactgtcccttcccaacttgattttgtggcttcagatttatggtctgtcttggctggtcactgtagcagtagtgttggtcctcaaggtaaatttcatttgcttgctgttgatgaaatcaataagtatatattggttggcgtatgcctctagtttatgtccttgttatgctgctgatatgctgccatttccttaggtggtatctatgggaagaaagaaatttagtgctgacttccagcttatgttccggctcctcaaattgttcttgttcattggatctgttggaactttggcgattcttttcacccttctgcaccttacagttggtgacatattcgccagcttccttgcctttgcacccacaggatgggccattctgcaggtacgtcatcactcatcagcaccaaagctttccttttgttttgttttaaggttttactcccagcttatcacgtgcgaggactgaggagtgaggagcagtatcaattcatagggagagagaaacgagagaattttgatcgagttaaagttgctattatcgaaattgacatctttcactggctctaatccgttcggcatcattgcaacagatatcacaggcaagcaagccagtggtgaaggcttttggtctgtggggatctgtgaaggccttgtccagggggtacgagtaccttatggggatcgtgatcttcgtgccagtggcggttctggcatggttcccttttgtctcggagttccagacgaggctgctattcaaccaggcattctcccgaggcctccaaatctctcgcattttggctggcggaaagaagcaaaactgaggcgagtctaggagatgggagatgttccatcacagtaatcacacagggtagacggaggcagaaattagctcgaggttcgttgttggaggggggcatcatatggctgctaacatactgacactttcagaagtttcttagtcttgtacacacagggcagttttccttaggcattttccatgtatatctcatgctaatacactcttacctctgatactagattgtacgttgcttgtatagatagatacatgcccccacaacagttgcgacaaaacattacggtgcttttagaggcaaagatgaaactgattttttgtgcatgaagcaacaaaacagttcggtctttctagattgagagatcaaatcgatttttgtgcatgaagatgtttgtgttgtgctgtacggtgtaccagtcagttccctgctttgtgcttgtgttgtctgaaactctgaatttaggctgatgtttgaacgcgctggcatttcccagctggaacctctgctttctataaaaaacaggcctgtatggcctttctaaaaatagtctgaattgatattacgtgagatctgtttttctagaatacaagagtaccttgcactggttcggactgttgcagcatatgagcataacataagttggacggctttttgcgttatgtttcatgcgtagacaaggataatgggacagaggttgtgaattatgacggtaggtacaactttacattaggtgaaggctgacatgagttaagatggaggacctgagtctgttatccttccagctttaagcaggccacctcacgtaatctgaattcacaaatgagctgaagcaacatcgattgcaatcataggagaccgatacagctttcagcttgtccctgcccgatgtctaatgattctccaagcgcagactgccaattaagtacacacgaggtgactgaaatcccacaacgacggtcatgatatcacaggaaaatttatatttttctgctttttaaaagttttttttctgcttttttgtttcccagctattgctgcattttggttcgagccatcatttctacggtcgggctgcttttgtagggtcagcgtgttttccgcgacaaattctcattgtgcctatcccgtcccccttcgcccactaggcaagaactctcagtgtcgtgactaggttttgacgtgcagagagtacacgacgcgtgatcgtgaggccaacacccaacagtatcctaggccctaacgcatggaaaccaagtgaccgagcgagaagagaatggaggcccagaatctttggtggaaagaaacgacgtggttgtcatgtacttatgctgattacaaaattgcaaagtctggtcagaaccatcatttggtcggcattgagagttttccttctttttgaatggacaggaattgagagttgatggtgcatggtgccatttaagcgatgttcaaacgggagctgtaaatcatcccgcattcggaaattattaaaccaatggcagttcatgggcaggcaaagccctgcacgaatcttggcggctcgcatcctctattgc

SEQ ID NO: 19 - DNA, 900 bp, synthetic construct
  misc_feature 1..900: note = Description of Artificial Sequence: Synthetic polynucleotide
  misc_feature 1..900: note = Chimeric wheat sequence
  source 1..900: mol_type = other DNA
atggtttccgctgacgcagctcgcaacgtcgtcggtatcatcgggaatgtcatctccttcggcctcttcctctcccctacgccggttttctggcggatcatcaaggccaaggacgtggaggagttcaagccggacccctacctggcgacgctgctcaactgcatgctctgggtcttctacggcctccccatcgtccaccccaacagcatcctcgtcgtcaccatcaatgggatcgggctcgtcatcgagggatcctacctcatcatcttcttcctctactccaccaacaacaagcggctgaagatgataggcgtgctcgccgccgaggcggcgttcatggtggccgtcgtgctaggcgtgctcctcggtgcccacacccacgagaagcgctccatgattgtcggcatcctctgcgtcatcttcggaaccatcatgtacgcctccccgctcctacaatatccggcggtatgtctggggcacttggacgacttggggagattcgaacactaggaatgctgagatcacgatttcactctttgcctggagccttcaatacatatttggtgccatcagacaaaggcagaaacagacgtttttcactcgcaaagcgcttcgcagaggtttcccccaacaagagaactgaagctgccaagtttgctcaactgtggaatgaagtgatttgcagtttccgcgacgaagattttataagtgataaggagatggacctattggtggttccatactcatcagacccgagcttaaaattgatgcagtggccgttgttcttgcttgctagcaagatacctatagctttagacatggcagcacaatttagaccaagagacagtgatttgtggaagcgtatatgtgcagacgagtatatgaagtgcgctgtaattg

SEQ ID NO: 20 - DNA, 2290 bp, synthetic construct
  misc_feature 1..2290: note = Description of Artificial Sequence: Syntheticpolynucleotide
  source 1..2290: mol_type = other DNA
caaataatgattttattttgactgatagtgacctgttcgttgcaacaaattgatgagcaatgcttttttataatgccaagtttgtacaaaaaagcaggctttaaccgcggtatacaaggaatctttaaacatacgaacagatcacttaaagttcttctgaagcaacttaaagttatcaggcatgcatggatcttggaggaatcagatgtgcagtcagggaccatagcacaagacaggcgtcttctactggtgctaccagcaaatgctggaagccgggaacactgggtacgttggaaaccacgtgatgtgaagaagtaagataaactgtaggagaaaagcatttcgtagtgggccatgaagcctttcaggacatgtattgcagtatgggccggcccattacgcaattggacgacaacaaagactagtattagtaccacctcggctatccacatagatcaaagctgatttaaaagagttgtgcagatgatccgtggcatcgggaatgtcatctccttgttttagagctagaaatagcaagttaaaataaggctagtccgttatcaacttgaaaaagtggcaccgagtcggtgcttttttttataacttaagccgcgggtatacttaattaaattggatgatctgataattaacccggggaccaagcccgttattctgacagttctggtgctcaacacatttatatttatcaaggagcacattgttactcactgctaggagggaatcgaactaggaatattgatcagaggaactacgagagagctgaagataactgccctctagctctcactgatctgggtcgcatagtgagatgcagcccacgtgagttcagcaacggtctagcgctgggcttttaggcccgcatgatcgggcttttgtcgggtggtcgacgtgttcacgattggggagagcaacgcagcagttcctcttagtttagtcccacctcgcctgtccagcagagttctgaccggtttataaactcgcttgctgcatcagacttgtacgtaccatgatggtgaggttttagagctagaaatagcaagttaaaataaggctagtccgttatcaacttgaaaaagtggcaccgagtcggtgctttttttccgcggcacgtctcgagcccgggttaattaaattggatgatgactctagataacgcagaagattaattaacccggggaccaagcccgttattctgacagttctggtgctcaacacatttatatttatcaaggagcacattgttactcactgctaggagggaatcgaactaggaatattgatcagaggaactacgagagagctgaagataactgccctctagctctcactgatctgggtcgcatagtgagatgcagcccacgtgagttcagcaacggtctagcgctgggcttttaggcccgcatgatcgggcttttgtcgggtggtcgacgtgttcacgattggggagagcaacgcagcagttcctcttagtttagtcccacctcgcctgtccagcagagttctgaccggtttataaactcgcttgctgcatcagacttgatcatcaaggccaaggacggttttagagctagaaatagcaagttaaaataaggctagtccgttatcaacttgaaaaagtggcaccgagtcggtgctttttttccgcggcacgtctcgagcccgggttaattaaattggatgatgactctagataacgcaggatccactagtaacggccgccagtgtgctggaattgcccttggatcatgaaccaacggcctggctgtatttggtggttgtgtagggagatggggagaagaaaagcccgattctcttcgctgtgatgggctggatgcatgcgggggagcgggaggcccaagtacgtgcacggtgagcggcccacagggcgagtgtgagcgcgagaggcgggaggaacagtttagtaccacattgcccagctaactcgaacgcgaccaacttataaacccgcgcgctgtcgcttgtgtgggggatgggggcttacgtagttttagagctagaaatagcaagttaaaataaggctagtccgttatcaacttgaaaaagtggcaccgagtcggtgctttttttgtcccttcgaagggcaattctgcagatatccatcacactggcggccgctcgaggtcgagggtatcgataagcttgaattcgacccagctttcttgtacaaagttggcattataaaaaataattgctcatcaatttgttgcaacgaacaggtcactatcagtcaaaataaaatcattatttg

SEQ ID NO: 21 - DNA, 2613 bp, synthetic construct
  misc_feature 1..2613: note = Description of Artificial Sequence: Syntheticpolynucleotide
  source 1..2613: mol_type = other DNA
caaataatgattttattttgactgatagtgacctgttcgttgcaacaaattgatgagcaatgcttttttataatgccaagtttgtacaaaaaagcaggctttaaccgcggtatacaaggaatctttaaacatacgaacagatcacttaaagttcttctgaagcaacttaaagttatcaggcatgcatggatcttggaggaatcagatgtgcagtcagggaccatagcacaagacaggcgtcttctactggtgctaccagcaaatgctggaagccgggaacactgggtacgttggaaaccacgtgatgtgaagaagtaagataaactgtaggagaaaagcatttcgtagtgggccatgaagcctttcaggacatgtattgcagtatgggccggcccattacgcaattggacgacaacaaagactagtattagtaccacctcggctatccacatagatcaaagctgatttaaaagagttgtgcagatgatccgtggcacacctgattgtttctcactgttttagagctagaaatagcaagttaaaataaggctagtccgttatcaacttgaaaaagtggcaccgagtcggtgcttttttttataacttaagccgcgggtatacttaattaaattggatgatctgactagataccggtctcgagttaacatgaatccaaaccacacggagttcaaattcccacagattaaggctcgtccgtcgcacaaggtaatgtgtgaatattatatctgtcgtgcaaaattgcctggcctgcacaattgctgttatagttggcggcagggagagttttaacattgactagcgtgctgataatttgtgagaaataataattgacaagtagatactgacatttgagaagagcttctgaactgttattagtaacaaaaatggaaagctgatgcacggaaaaaggaaagaaaaagccatacttttttttaggtaggaaaagaaaaagccatacgagactgatgtctctcagatgggccgggatctgtctatctagcaggcagcagccctaccaacctcacgggccagcaattacgagtccttctaaaacgtcccgccgagggcgcgtggccgtgctgtgcagcagcacgtctaacattagtcccacctcgccagtttacagggagcagaaccagcttataagcggaggcgcggcaccaagaagcaacttgcatctaatgtggccgttttagagctagaaatagcaagttaaaataaggctagtccgttatcaacttgaaaaagtggcaccgagtcggtgccaacattttttttgtccttctgtttttttagtcagtctcttttttcagaagtacaacatcttttttttgtccttctgtttttttagtcagtcttttttcagaagtactctatgtgatatcttcgttctgggaaatgtctgtctgtctacaacccataattatatttgcaatcacacatctaatatctctgtgacaagacagccgaacaacctaggtaagattaattaacccggggaccaagcccgttattctgacagttctggtgctcaacacatttatatttatcaaggagcacattgttactcactgctaggagggaatcgaactaggaatattgatcagaggaactacgagagagctgaagataactgccctctagctctcactgatctgggtcgcatagtgagatgcagcccacgtgagttcagcaacggtctagcgctgggcttttaggcccgcatgatcgggcttttgtcgggtggtcgacgtgttcacgattggggagagcaacgcagcagttcctcttagtttagtcccacctcgcctgtccagcagagttctgaccggtttataaactcgcttgctgcatcagacttggatggccaatgcgagatgagttttagagctagaaatagcaagttaaaataaggctagtccgttatcaacttgaaaaagtggcaccgagtcggtgctttttttccgcggcacgtctcgagcccgggttaattaaattggatgatgactctagataacgcaggatccactagtaacggccgccagtgtgctggaattgcccttggatcatgaaccaacggcctggctgtatttggtggttgtgtagggagatggggagaagaaaagcccgattctcttcgctgtgatgggctggatgcatgcgggggagcgggaggcccaagtacgtgcacggtgagcggcccacagggcgagtgtgagcgcgagaggcgggaggaacagtttagtaccacattgcccagctaactcgaacgcgaccaacttataaacccgcgcgctgtcgcttgtgtgatagtagttagtgccgcgtgttttagagctagaaatagcaagttaaaataaggctagtccgttatcaacttgaaaaagtggcaccgagtcggtgctttttttgtcccttcgaagggcaattctgcagatatccatcacactggcggccgctcgaggtcgagggtatcgataagcttgaattcgacccagctttcttgtacaaagttggcattataaaaaataattgctcatcaatttgttgcaacgaacaggtcactatcagtcaaaataaaatcattatttg

SEQ ID NO: 22 - DNA, 19 bp, synthetic construct
  misc_feature 1..19: note = Description of Artificial Sequence: Syntheticoligonucleotide
  source 1..19: mol_type = other DNA
tcgggaatgtcatctcctt

SEQ ID NO: 23 - DNA, 19 bp, synthetic construct
  misc_feature 1..19: note = Description of Artificial Sequence: Syntheticoligonucleotide
  source 1..19: mol_type = other DNA
tacgtaccatgatggtgag

SEQ ID NO: 24 - DNA, 19 bp, synthetic construct
  misc_feature 1..19: note = Description of Artificial Sequence: Syntheticoligonucleotide
  source 1..19: mol_type = other DNA
atcatcaaggccaaggacg

SEQ ID NO: 25 - DNA, 19 bp, synthetic construct
  misc_feature 1..19: note = Description of Artificial Sequence: Syntheticoligonucleotide
  source 1..19: mol_type = other DNA
ggggatgggggcttacgta

SEQ ID NO: 26 - DNA, 19 bp, synthetic construct
  misc_feature 1..19: note = Description of Artificial Sequence: Syntheticoligonucleotide
  source 1..19: mol_type = other DNA
cacctgattgtttctcact

SEQ ID NO: 27 - DNA, 19 bp, synthetic construct
  misc_feature 1..19: note = Description of Artificial Sequence: Syntheticoligonucleotide
  source 1..19: mol_type = other DNA
acttgcatctaatgtggcc

SEQ ID NO: 28 - DNA, 19 bp, synthetic construct
  misc_feature 1..19: note = Description of Artificial Sequence: Syntheticoligonucleotide
  source 1..19: mol_type = other DNA
gatggccaatgcgagatga

SEQ ID NO: 29 - DNA, 19 bp, synthetic construct
  misc_feature 1..19: note = Description of Artificial Sequence: Syntheticoligonucleotide
  source 1..19: mol_type = other DNA
atagtagttagtgccgcgt

SEQ ID NO: 30 - protein, 554 aa, Triticum aestivum
MGGGDYHQQSLIGGAAVHGHGGGTVEAALRPLVGGSHGWDYCMYWRLSPDQRFLEMAGFCCSAEFEAQVATLADVPCSIPLDSSSIGMHAQALLSNQPIWQSSGGAPGPDLLTGYEAASSGGEKTRLLVPVAGGIVELFASRYMVEEQQMAELVMAQCGGGGQGWQETEAQGFAWDAAAAADSGRLYAAASLNLFDGAGGSGSGEPFLAGVQDDGAAGVGWQYAAESSEPPSTVAQEHQQLHGSGVGRADSGSEGSDMQLGDPDDDGNGETQRGSGKDGKDAEGKRQQCKNLEAERKRRRKLNDRLYKLRSLVPNITKMDRASILGDAIDYIVGLQKQVKDLQDELEDPNPPGVTGGDSKAPDVLLDDHPPPGLDNDEDSPQQQPFPSAGGKRPRKEEAGDEEEKEAEDQDMEPQVEVRQVEGKEFFLQVLCSHKSGRFVRIMDEIAALGLQITSVNVTSYNKLVLNVFRAVMKDNEAAVPADRVRDSLLEVTREMYGGAGAWSSPVPPPPLTNAKLDGMDGQAVPTVAGEHYQLHHQVLGGYHHQHLQYLAMD

SEQ ID NO: 31 - protein, 553 aa, Triticum aestivum
MGGGDYHQQSLNGGAAVHGHGGGGGGTVEAALRPLVGGSHGWDYCIYWRLSPDQRFLEMAGFCCSAEFEAQVATLADVPCSIPLDSSSVGMHAQALLSNQPIWQSSGGSPGPDLLTGYEAASSGGEKTRLLVPVAGGIVELFASRYMAEEQQMAELVMAQCGGGGQGWQETEAQGFAWDAAAADPGRLYAAASLNLFDGAGGSGSGEPFLAGVQEDGAAGVGWQYAAESSEPPSTVAQEHQQLHGSGVGRADSGSEGSDMQLGDPDDEVDGETQRGSGKDGCGKRQQCKNLEAERKRRKKLNERLYKLRSLVPNITKMDRASILGDAIDYIVGLQKQVKDLQDELEDPNLPGITGGDSKAPDVLLDDHPPPGLDNDEDSPQQQPFPSAGGKRLRKEEAGDEEEKEAEDQDMEPQVEVRQVEGKEFFLQVLCSHKSGRFVRIMDEIAALGLQITSINVTSYNKLVLNVFRAVMKDNEAAVPADRVRDSLLEVTREMYSGGGTWSSPVPPPPPTNAKLDGMDGQAVPAAAGDHYQLHHQVLGGYHHQHLQYLAMD

SEQ ID NO: 32 - protein, 554 aa, Triticum aestivum
MAGGDYHQQSIIGGRAAVHGHGGGGGGTVEAALRPLVGGAHGWDYCIYWRLSPDQRFLEMTGFCCSAEFEAQVATLADVPSSIPLDSSSIGMHAQALLSNQPIWQSSGGAPGPDLLTGYEASSSGGEKTRLLVPVAGGIVELFASRYMAEEQQMAELVMAQCGGGGQGWQETEAQGFAWDAAAADPGRLYAAASLNLFDGAGGSGSGEPFLAGVQEDGAAGVGWQYAAESSEPPSTVAQEHQQLHGSGVGRADSGSERSDMQLGDPDDNVDGETQRGSGKDGGGKRQQCKNLIAERKRRKKLNNRLYTLRSLVPNITKMDRASILGDAIDYIVGLQKQVKDLQDELEDPNPPGVTGGHSKAPDVLLDDHPPPGLDNDEDSPQQQPFPSAAGKRPRKVEAGEEEEKEAEDQDMEPQVEVRQVEGKEFFLQVLCSHKSGRFVRVMDEIAALGLQITSVNVTSYNKLVLNVFRAVMKDNEAAVPADRVRDSLLEVTREMYGGGGAWSSPLPPPPPTNAKLDGMDGQAVPAAAGDHYQLHHQVLGGYHHQHLQYLAMD

SEQ ID NO: 33 - protein, 248 aa, Triticum aestivum
MCTATPQSASARCCLVNMIVGGGYFEGSHDHNLMPGSLIKPDFANERQRREWMNVAFWALRILLPDPKDDRVSNVEDAIEYIHELNRTVKELKILVEQKRHGTNRKKMIKMDEEAASDGENSSTMPVRDEQDNELDWAIRSSWVQRRSQECRVDVHIVENAVNVQLTEWKNANSLPHAAKVLDEFHLEIISVVGQIVGDHRIFIFNTKVSEGCSVYALAVAERLFQAVDAQHQALNILGQALATKLTI

SEQ ID NO: 34 - protein, 482 aa, Triticum aestivum
  VARIANT 36..37: note = Any amino acid
MGLLYTEEQTATLHSLKLHGSTSFATTKTARPTAIXXHDSSLAPKCNDNTNIELQRFKVQSFSADILSDSTNLSSEAARAINHLQHQLGIGLEQDMPPVGTATWDTSICTIQDQIINHQLSEDPQNILVQQQIQQYDAALYPNSGYTPAPDLLNLLHCTVAPVFPATASVFGDTALSGDTNYLDLNGEFTGVAAIPDSGLMYTSDPALQLGYHAAQSHALKDICHSLPQNYGLFPSEDERDVMLGVGSVGGDLFQDIDDRQFDTVLEGRRGKGEFGKGKGKANFATERERREQLNVKYKTLRMLFPNPTKNDRASVVGDAIEYIDELNRTVKELKILVEQKWHGTNRRKIRKLDEEAAADGESSSMRPMRDEQDNQLDGAIRSSWVQRRSRECHVDVRIVENEINIKLTEKKKTNSSLLHVAKVLDEFHLEIIHVVGGIIGDHYIFMFNTKVTEGSSVYACAVAKRILQAVDAQHQALDIFN

SEQ ID NO: 35 - protein, 387 aa, Triticum aestivum
MPPVETATWDTSICTIQDQIINHQLSEDPQNILVQQQIQQYDAALYPNSGYTPAPDLLNLLHCTVAPVFPATASVFGDTALSGGTNYLDLNGEFTGVAAIPDSGLMYTSDPALQLGYHAAPSHALKDICHSLPQNYGLFPSEDERDVMLGVGSVGGDLFQDMDDRQFETVLEGRRGKGEFGKGKGKANFATERERREQLNVKYKTLRMLFPNPTKNDRASVVGDAIEYIDELNRTVKELKILVEQKWHGTNRRRTRKLDEEAAADGESSSMRPMRDEQDNQLDGAIRSSWVQRRSRECHVDVRIVENEINIKLTEKKKANSSLLHVAKVLDEFHLEIIHVVGGIIGDHYIFMFNTKVTEGSSVYACAVAKRILQAVDAQHQALDIFN

SEQ ID NO: 36 - DNA, 1665 bp, Triticum aestivum
  source 1..1665: mol_type = unassigned DNA
atgggaggaggagattatcaccagcagagcctcatcggcggtgcggctgttcatggccatggagggggcaccgtggaggctgcgctgaggccgctcgtcggcggctcccacggctgggactactgcatgtactggcggctctctcctgaccagaggttcttggagatggcgggtttttgctgcagcgccgagttcgaggcgcaggtggccacgctcgccgacgtcccttgctccatccctcttgactcctcctccatcgggatgcacgctcaggcgctactgtcgaaccagccaatctggcagagcagcggcggggcgccgggtccggatctcctcacgggctacgaggctgcctccagcggcggcgagaagacgcggctcctcgtccccgtcgccggcgggatcgtcgagctcttcgcgtcgagatatatggtcgaggagcagcagatggcggagctggtcatggcgcagtgcggtggcggtgggcaggggtggcaggagacggaggcgcaggggttcgcgtgggacgcggcggcggcggcagactcggggcggctctacgcggcggcgtcgctcaacctgttcgacggcgccgggggaagcggctccggcgagccgttcctggcgggagtgcaggacgacggcgcggcgggcgtggggtggcagtacgcggcggagagcagcgagccgccgtcgacagtggcgcaggagcatcagcagctgcacggctcgggcgtggggagggcagattcagggtcggaggggagcgatatgcagctgggggaccccgacgacgacggcaacggcgagacgcagaggggctccggcaaagacggcaaagacgcagaggggaagcggcagcagtgcaagaacctcgaggcggagcggaagcggcgcaggaagctcaacgaccgcctgtacaaactccggtccctcgtccccaacattactaagatggaccgggcgtcgatcctcggggacgcgatcgactacatcgtggggctgcagaagcaggtgaaggacctgcaggacgagctggaggacccgaacccgccgggggtcaccggcggcgacagcaaggcccccgacgtgctcctcgacgaccacccgccgccgggcctcgacaacgacgaggactcgccgcagcagcagccgttcccgtcggccggcgggaagcggccccggaaggaggaggccggcgacgaggaggagaaggaggcggaggaccaggacatggagccgcaggtggaggtccggcaggtggaggggaaggagttcttcctgcaggtgctctgctcccacaagtccgggcgcttcgtccgcatcatggacgagatcgccgccctcggcctccagatcaccagcgtcaacgtcacctcctacaacaagctcgtcctcaacgtcttccgggccgtcatgaaggacaacgaggcggcggtgccggcggacagggtgagggactcgctgctggaggtgacgagggagatgtacggcggggccggggcgtggtcgtccccggtccctccgccgccgctgacaaacgcgaagctcgatggtatggacgggcaggcggtgccgacggtggccggggagcactaccagctgcaccaccaggtgctgggaggatatcatcaccagcatctgcagtacctcgccatggattga

SEQ ID NO: 37 - DNA, 1662 bp, Triticum aestivum
  source 1..1662: mol_type = unassigned DNA
atgggaggaggagattatcaccagcagagcctcaacggcggtgcggctgttcatgggcatggagggggagggggcggcaccgtggaggctgcgctgaggccgctcgtcggcggctcccacggctgggactactgcatctactggcggctctctcctgaccagaggttcttggagatggcggggttttgctgcagcgccgagttcgaggcgcaggtggccacgctcgccgacgtgccttgctccatccctcttgactcctcctccgtcgggatgcacgctcaggcgctactgtcgaaccagccaatctggcagagcagtggcgggtcgccgggcccggatctcctcacgggctacgaggctgcctccagcggcggcgagaagacgcggctcctcgtccccgtcgccggcgggatcgtcgagctcttcgcgtcgagatatatggcggaggagcagcagatggctgagctggtcatggcgcagtgcggtggcggtgggcaggggtggcaggagacggaggcgcaggggttcgcgtgggacgcggcggcggcagaccccgggcggctctacgcggcggcgtcgctcaacctattcgacggcgccgggggaagcggctccggcgagccgttcctggcgggagtgcaggaggatggcgcggcgggcgtggggtggcagtacgcggcagagagcagcgagccgccgtcgacggtggcgcaggagcatcagcagctgcacggctcgggcgtggggagggcagattcggggtcggaggggagcgatatgcagctgggagaccccgacgacgaagtcgacggcgagacgcagaggggctccggcaaagacggctgcgggaagcggcagcagtgcaagaacctcgaggcggagcggaagcggcggaagaagctcaacgaacgcctctacaagctccggtccctcgtcccaaacattaccaagatggaccgggcgtcgatcctcggggacgcgatcgactacatagtggggctgcagaagcaggtgaaggacctgcaggacgagctggaggacccaaacctgccggggatcaccggcggcgacagcaaggcccccgacgtgctcctcgacgaccacccgccgccgggcctcgacaacgacgaggactcgccgcagcagcagccgttcccgtccgccggcggcaagcggctccggaaggaggaggcgggcgacgaggaggagaaggaggcggaggaccaggacatggagccgcaggtggaggtccggcaggtggaggggaaggagttcttcctacaggtgctgtgctcccacaagtccgggcgcttcgtccgcatcatggacgagatcgccgccctcggcctccagattaccagcatcaacgtcacctcctacaacaagctcgtcctcaacgtcttccgcgccgtcatgaaggacaacgaggcggcggtgccggcggacagggtgagggactcgctgctggaggtgaccagggagatgtacagcgggggcggcacgtggtcgtccccggtccctccgccgccgccgacaaacgcaaagctcgatggcatggacgggcaggcggtgccggcggccgccggggaccactaccagctgcaccaccaggtgctgggaggatatcatcaccagcatctgcagtacctcgccatggattga

SEQ ID NO: 38 - DNA, 1665 bp, Triticum aestivum
  source 1..1665: mol_type = unassigned DNA
atggcaggaggagactatcaccagcagagcatcatcggcggccgtgcggctgttcatggccatggagggggaggcggcggcaccgtggaggctgcgctcaggccgctcgtcggcggcgcccacggctgggactactgcatctactggcggctctctcctgaccagcggttcttggagatgacggggttctgctgcagcgcggagttcgaggcgcaggtggccacgctcgccgacgtcccttcctccatccctctcgactcctcctccatcgggatgcacgctcaggccctgctgtcgaaccagccgatctggcagagcagcggcggggcgccgggtccggatctactcacgggctacgaggcttcctccagcggcggcgagaagacacggctcctcgtccccgtcgccggcggcatcgtcgagctcttcgcttcaagatacatggcggaggagcagcagatggcggagctggtcatggcgcagtgcggcggcggtgggcagggatggcaggagacggaggcgcaggggtttgcgtgggacgcggcagcggcagacccggggcggctctacgcggcggcgtcgctcaacctgttcgacggcgccgggggaagcggctcgggcgagccgttcctggcgggagtgcaggaggacggcgcggcgggcgtgggttggcagtacgcggcagagagcagcgagccgccgtcgacggtggcgcaggagcatcagcagctgcacggctcgggcgtggggagggcggactcggggtcggagaggagtgacatgcagctgggggaccccgacgacaacgtcgacggcgagacgcagaggggctccggcaaagacggcggcgggaagcggcagcagtgcaagaacctcatcgcggagcggaagcggcgcaagaagctcaacaaccgcctctacacgctccggtccctcgtccccaacatcaccaagatggaccgtgcgtcgatcctcggggacgcgatcgactacatcgtggggctgcagaagcaggtgaaggacctgcaggacgagctggaggacccgaacccgccgggggtcaccggcggccacagcaaggcccccgacgtgctcctcgacgaccacccgccgccgggcctcgacaacgacgaggactcgccgcagcagcagccgttcccgtccgccgccggcaagcggccccggaaggtggaggcgggcgaggaggaggagaaggaggcggaggaccaggacatggagccgcaggtggaggtccggcaggtggaggggaaggagttcttcctgcaggtgctgtgctcccacaagtccgggcgcttcgtccgcgtcatggacgagatcgccgccctcggcctccagatcaccagcgtcaacgtcacctcctacaacaagctcgtcctcaacgtcttccgcgccgtcatgaaggacaacgaggcggcggtgccggcggacagggtgagggactcgctgctggaggtgacgagggagatgtacggcgggggcggcgcgtggtcgtccccgctccccccgccgccgccgacgaacgcgaagctcgatggcatggacgggcaggcggtgccggcggcggccggggaccactaccagctgcaccaccaggtgctgggaggatatcaccaccagcatctgcagtacctcgccatggattga

SEQ ID NO: 39 - DNA, 747 bp, Triticum aestivum
  source 1..747: mol_type = unassigned DNA
atgtgcactgcaactccgcagtctgcaagtgccaggtgctgtttggtcaatatgattgttgggggtggctattttgaaggttcccatgatcataatctcatgccgggatctttaataaaacctgactttgcaaatgagaggcagaggagggaatggatgaatgtagcgttctgggctttaagaatcctcctccccgatcccaaggacgacagggtctcaaatgtagaggatgccattgaatacatacatgagctgaaccggacagtgaaggaactgaagatcctagtagaacagaagaggcatgggactaataggaaaaagatgataaagatggacgaagaggcagcttccgatggcgagaactcatcgacgatgccagtgagggatgagcaagacaatgagctcgattgggccataaggagctcctgggtgcagaggaggtcccaggaatgccgtgttgatgtccacatagtggaaaatgcagtaaacgtccagctcactgaatggaagaacgccaactccctgcctcatgccgcgaaggttctcgacgagttccatcttgagatcatcagcgtggtcggacagattgttggcgatcaccgcatattcatcttcaacactaaggtatctgaaggctgctcggtgtatgcccttgcagtggccgagaggctctttcaagcagttgatgcacagcaccaggccctcaacatactcggccaggctctagcaaccaaactgactatctga

SEQ ID NO: 40 - DNA, 1662 bp, Triticum aestivum; identical to SEQ ID NO: 37
  source 1..1662: mol_type = unassigned DNA

SEQ ID NO: 41 - DNA, 1164 bp, Triticum aestivum
  source 1..1164: mol_type = unassigned DNA
atgccaccagtggaaactgcgacctgggatacttctatctgcaccattcaagaccaaataatcaaccatcagcttagcgaagatccacaaaacatattggtgcaacaacagattcaacagtatgatgctgcgctttatccaaacagtggttacacaccagcacctgatctcttaaaccttctccactgcactgtggctccagtgttccctgcaacagcatcagtctttggtgatacagcactaagtggtggtaccaactatttggatcttaatggtgagtttacaggagtggcagcaattcctgacagcggattaatgtacactagtgatccggcattgcagttagggtaccatgctgccccgtctcacgcactaaaggatatctgccattcactgccgcaaaattatggactgttccccagtgaggatgaaagagatgtcatgcttggggttggaagtgtcggaggagatctttttcaggatatggatgacaggcaatttgaaactgtactggagggcagaagagggaagggtgagttcggaaagggaaaaggaaaagctaactttgcgactgagagagagaggagggaacagctaaatgtgaagtataagactttaagaatgctcttccccaatcctaccaagaatgacagggcttcagtagtaggtgatgccattgaatacatagatgagctgaatcgaacagtgaaggaactgaagatcctagtggaacagaagtggcatgggactaataggagaaggacaagaaagttggatgaagaggcggctgctgatggtgaaagctcatcgatgaggccaatgagggatgagcaagacaatcagcttgatggggccataagaagctcatgggttcagaggaggtccagggagtgccatgttgatgttcgcatagtggaaaatgaaataaacatcaagctcacagaaaagaagaaggccaactcctccctgcttcatgttgcaaaggttcttgacgaattccatcttgagatcatccatgtggttggagggattattggtgatcactacatattcatgtttaacactaaggtgactgaaggttcctcagtttatgcttgtgcagtggcaaagaggatccttcaggcagtggatgcacaacaccaggcacttgacatattcaactag

SEQ ID NO: 42 - DNA, 6080 bp, Triticum aestivum
  source 1..6080: mol_type = unassigned DNA
gaccccaaagttggggcagtccaacgaacgctagacgaaacaagcaggaaaacaaaattaaatcatgaaagtgccctttcgaacaaggcaagttactagcgaggggcatactgaagcagaattgtttcatcgacagcagaaaggtcaacgtcatttcattcgtgtagcatgctggtcttacaacactacctctaagtacgtaccgatttccagatgaagaataattggggcgctttcgccttacgaaaagaaagcaagcaagaagagatcatgggcgtaatcacaccgctgatggtacatttcatgcctgaaattgcatcttgttataacccgagagatccatccatctattgtgaccatctttcttttctggctttctattgcggccatgcatttcatgccttgctgaaattgtagatgtcccgcttcaagaaatccccccccccccccttttccttttttttttgccttggtgttgtatgttcttttacatcatggtaatgatcagaaggttttatggaatatgtttccttataaaatcattgaaaaaactctcacctgataaggatgtattagtgtgtgatcccaagattggggcagcccatcggacggtggacgaaacaagcaggaaaacaaaattcgagcacgaacgttccctttcgaaaggccaagttactagcggaggggcaaaccgaagcagaactgtttcatcgacaacagaaaggtcgaggtcatttcattcctgcggcgtgcgggttttctgtcactacctctaagaacatattgatctccagatgacaaaaaatcggagcgctttcgtttcgccttactataataaagcaagcataatcatactgctgatggcacgtctcgtgcctgaaattgcaagacagttctgtttcagtaatccagccgtccattgctccttcttttctttttcgcccctaggaaaatttctgttgtgtgtgttcttttaggtgataaacgaatcatgatgaagatgaactgagtgatgcgtgaacggtacagtaacacatttcgtcagcagatatcttcactagccggccttgccgatgcaaacaacctccgatgtcaccccgtccttcctctcatccctgggctgggcgaaatggcatgcgtgcccctgctcctcttaggtgcctcctcgttagacggcatgtcaccaacgtcatttcctggctggatcatgagaatgtggcagtgtgcacactgcatccccatgacaccacacctttcagagaagaactgagcatcacaattgcatcttgcttaactaggcaattaatcaactgagccacaccatttgcattgtgcaagttcgagccaaatctgtggccggcactagtagtggagttaagctaaatgaattaagttaaccaggggtgtggattttgaaatccctcacacctttgttgcaccccacctacccataacagcccccgattgagcgcggcgatgataccggtggcgatggataaaagagagagcacattcatgctaatcatcaggttttcaccagcaattaggcacttgcatttctgaattgcgtccccaaaatggcatagaggtgtatggccctatgctttgcggatgatgcaacacccctgcagctagctagcagcattcagttgagatggttcttcggttagcgattgctttcagctggtacacgccgtttttccggatcggtccgtctgccggccgttcgctgggcagcctctactgaaaggtagctttctcctgagcccatccaagaacaaccatgacaatgacaccaagcagtctaggtttatgcaattctgttactagctcacacttgattttgatcctctgcttgctgatgatcatgatgcatgcatgatagtactagtactatataatgtgttgtacaacctttgctggcagcaatcgtatgtagtctgaagtttcttgcagccctgtgacaccggtgacatcaacaaatcctatcctgattcctggcagcagagaaagccttgcgtatgcatggattgaattgattgcactgcttcgatggatgtgtcactcacttcacttgctcaatcctaggacaagctgaccactggtgctgagctgggctgagctgagccatgggaggaggagattatcaccagcagagcctcatcggcggtgcggctgttcatggccatggagggggcaccgtggaggctgcgctgaggccgctcgtcggcggctcccacggctgggactactgcatgtactggcggctctctcctgaccagaggtatggacgcgtctgcgtgtgtgttcgatttattgttcataccatttgtgttcccagagcttgatgatgatgattcatggcgggggtgacggatatacggtaggttcttggagatggcgggtttttgctgcagcgccgagttcgaggcgcaggtggccacgctcgccgacgtcccttgctccatccctcttgactcctcctccatcgggtaattaaactggcttcttcttcttctcctggatgcaattgcctgccggccatgtcgatcgccattaagttttggtcggcgctctgtttgactgctgattttgttggctggtcttggtcaggatgcacgctcaggcgctactgtcgaaccagccaatctggcagagcagcggcggggcgccgggtccggatctcctcacgggctacgaggctgcctccagcggcggcgagaagacgcggctcctcgtccccgtcgccggcgggatcgtcgagctcttcgcgtcgagatatgtacgtgcgtgcgtgcgtgccgggtgatgggaaatatcgcttagttttggaagtagttagggagcacgccgttcgcgtgagccgacgcgacggcggcgacaacggcggtgcaccgtacgcaacagccttcgcgtttccgtggtccgtatatatatacggctgacctgactgggtgccattaacgcagatggtcgaggagcagcagatggcggagctggtcatggcgcagtgcggtggcggtgggcaggggtggcaggagacggaggcgcaggggttcgcgtgggacgcggcggcggcggcagactcggggcggctctacgcggcggcgtcgctcaacctgttcgacggcgccgggggaagcggctccggcgagccgttcctggcgggagtgcaggacgacggcgcggcgggcgtggggtggcagtacgcggcggagagcagcgagccgccgtcgacagtggcgcaggagcatcagcagctgcacggctcgggcgtggggagggcagattcagggtcggaggggagcgatatgcagctgggggaccccgacgacgacggcaacggcgagacgcagaggggctccggcaaagacggcaaagacgcagaggggaagcggcagcagtgcaagaacctcgaggcggagcggaagcggcgcaggaagctcaacgaccgcctgtacaaactccggtccctcgtccccaacattactaaggtaatcactatcgtccttccatggccgccggcccgccgccacccgccatgcatgattcttgtaaatttcaaagctcaaagagagcgcgtggatccatgtgggcagatggaccgggcgtcgatcctcggggacgcgatcgactacatcgtggggctgcagaagcaggtgaaggacctgcaggacgagctggaggacccgaacccgccgggggtcaccggcggcgacagcaaggcccccgacgtgctcctcgacgaccacccgccgccgggcctcgacaacgacgaggactcgccgcagcagcagccgttcccgtcggccggcgggaagcggccccggaaggaggaggccggcgacgaggaggagaaggaggcggaggaccaggacatggagccgcaggtggaggtccggcaggtggaggggaaggagttcttcctgcaggtgctctgctcccacaagtccgggcgcttcgtccgcatcatggacgagatcgccgccctcggcctccagatcaccagcgtcaacgtcacctcctacaacaagctcgtcctcaacgtcttccgggccgtcgtacgttccgctcccgccggccgatcgccattgctgtagcctgctggatatagggattcacggtggccttaatttggttggtttgcagatgaaggacaacgaggcggcggtgccggcggacagggtgagggactcgctgctggaggtgacgagggagatgtacggcggggccggggcgtggtcgtccccggtccctccgccgccgctgacaaacgcgaagctcgatggtatggacgggcaggcggtgccgacggtggccggggagcactaccagctgcaccaccaggtgctgggaggatatcatcaccagcatctgcagtacctcgccatggattgattcatcccctttattacttgctactataggtccatggatggattagttttctttttctttagcaaaagaaaaagagggttccctctccgatttcgttaatgaaaccaaagacaaccaaaactaccagggtttcccctgctttacatataaaacaaccaacatcgattacatagcaacgttgggcgagcagcacaccaagaaagaaacgagaaagaaagaacaaaaagaaacaaatgccaacaacagcagcacgacaaaacgtggatgacccgccaccgctgcatcctccggattcatcccaccaccgcccaaggatctgcaccaccatggaccaagcagcaccacgaagaaggaatgcgatgccgacgaagctgctgcctggaggtgtcctagggttttccctggcacgcgaaggggagtgggggctgagcaccaccgccatccttcaggaaggaatggcggcaccgtgtcggcaccggaagaactggcagggttttctccagtcggtgtaatgagaaccagggtctcactaacctctaaagatgggccatgacagtgctcagcaacgctcggcaatcatttcgccggcaagcactactcccgtgcggggagcgtctctcctgcggcatggatcaacactcaagcaaaccaaccagaagatcccccaggaaggcctcccctgccgggtagacgagtctagcggagtcaagaccatgcccgggatcgagtccaagccactccagcagggtctctggggccgccaagccaaaccccggaaagcctcggaccggcaagcaaattccttgagaccccggcaagcctcggatcggcaagcaagttccttgccgcccggcaagtattgacccgacaagctgcggaacggcaagcaaaattccttgccggcactctatatcaattaaaggcacgacattagataaatgaggactgcatggccatgtattcatccaccactctagaactacctctattggagtcttcccaagcacgtgtcaagatggcatggctagatgctcaagtggtggtgactaggcatgctacttttccaagtggtgcatttaattcactgtcagtgatgaggatgatcacactgtagtaactttacacctcttgtatgcactgtacgccaccattggagaccccttggacatataaaaggaggcccaaggcatagcagaagggggcttctggccgagttgatacgggtagctactgtgtgcggtttatcacagagaagcaggattagggttttacgcattcttgcggcccgaatctaggtaaacgatccttgtgctgaccgccagacccgctctttccacagccccgtgcccgccaaccgtagaagggattccccgtgatcccataggtgtcattccaccgacatctttggcgcgccaggcaggggcggcgcagttgtgaaaatctggtctagcagttagcgcatcagtttcttcaagatcatcatcatcaccttccatggcgcccatgaaaaagggctctatgacaatgaagctttccacgtccaagcttccttcacccacacatgcggatggtgcgggcggcgctactggcgcagacggcgcggctgctgcggtaggcatgaccggcgcaggcgacgtggtcgccgtgcccgctgcagcaagagcgggcgatggagatgctgg

SEQ ID NO: 43 - DNA, 5489 bp, Triticum aestivum
  source 1..5489: mol_type = unassigned DNA
tatgtttacgaagcgggacgaaactaagaatatcacctccctttaatagtaggtatagatatagatatagatatagatatagattgacggaaagacaaagagcaagagttctggttggtcaaattggataccaattttggcaggaacattgttcattggcactattactcgaacagacgccttataaaatcattgaacaaactctcacctgatatggatatattagtgtgtgatcacaagattggggcagcccgttggacggtagacgaaacaagcaggaaagctaaattcaagcacgaacgaaaggccaagttactagcggaggggcaaaccgaagcagaactgtttgatcgacaacagaaaggtcgaggtcatttcactcctgcagcgtgcgggttttctcttttctgtcactactcactacctctaagaacgtatcgatctccagatgatgaaaaatcggtccgctttcgtttcgccttatactccctccgtcccaaatttcttgtcttagatttgtctagatatggatgtacctaatactaaaacatgacttgatacattcgtatttggacaaatctaaaacaagaattttgggacggagggagtactaaaataaagcaagcataatcatactgctgatggcacgtctcgtgcctgaaattgcaaaacagttctgtttcagaaatccagccgtccattgctccttctttgctttttcgcccatacgaaaatttcttttgtgtctgtcctcttaggtgatgaacgatcatgatgaagatgaactgagtgatgcgtggactgtacagtaacacatttcgtcagctgatatcttcaccagcgaagcagccggcctttgccgatgcaaacaacctccgatgtcagcccgtccagctctcatccttgggcaaaatgtcatgcgtgcccctcctctttgcttgatcatgagaaagtggcagtgtgcacactgcatccccatgacaccacacctttcagagaagaaccgggcatcagaattgcatcttgcttaactatgcattaatcaattgaaccacatcatttgcattgtgtaagtttgagtcaaatctgtggccagcattagtagtggagttaagttaaatgaatgaagttgtaccggggtgtggattttgaaatccctcacacctttgttgcaccccacctacccgtaacaggctaacagcctccgatcgagcacggcgatgataccggtggcgatggataaaagagagagcacactcatgctaatcatcaggttttcaccagcaattaggcacttgcatttctgaattgcgtccccaaaatggcatagaggtgtatggccctatgctttgctgatgaatgatgatgcaacacccctgcagctagcagcattcagttgagatggttcttcggttagcgattgctttcagctgatacacgccgtttttccggatcggtccatctgccggcggatcgccaggcagcctctactgaaaggtagctttctcctgagcccatccaagaacaaccatgacaatgacaccaagcagtctaggtttatgcaattttgttactagttcacccttgtttttgatcctctgcttgctgatgatcatgatgcatgcatgatagtactagctagtactatataatgtgttgtacaagctttgctggctgcaatggtatgtaataatctgaagtttcttgctggcctgtgacaccggtgacatcaacaaatcctatcctgattcctgacagcagctggctagcagcagcgaaagccttacgtatgcatggattgaattgatcgatgtgtcactcacttcacttgctcaatcctaggacaagctgaccactggtgcttagctgggctgagctgagccatgggaggaggagattatcaccagcagagcctcaacggcggtgcggctgttcatgggcatggagggggagggggcggcaccgtggaggctgcgctgaggccgctcgtcggcggctcccacggctgggactactgcatctactggcggctctctcctgaccagaggtatggacgcttctgcgtgtgtgttcgatttattgttcataccatttgtgttcccagagcttgatgatgatgattcatggcggcgatgacggacatacggcaggttcttggagatggcggggttttgctgcagcgccgagttcgaggcgcaggtggccacgctcgccgacgtgccttgctccatccctcttgactcctcctccgtcgggtaattaaactggcttcttcttcttctcctggatgcaattgcctgccggtcatgtcggtcgccaatcgccattaagttttggtcggcgctctgtttgactgctgattttgttggctggtcttggtcaggatgcacgctcaggcgctactgtcgaaccagccaatctggcagagcagtggcgggtcgccgggcccggatctcctcacgggctacgaggctgcctccagcggcggcgagaagacgcggctcctcgtccccgtcgccggcgggatcgtcgagctcttcgcgtcgagatatgtacgtgcgtgcgtggccggtgatgggaaatatcggttagttttggaggtagttagggagcacgccgttcgcgtgagccgacgcggcggcggcggcaacggcggtgcaccgtacgcaacagccttcgcgtttccatggtccgtttatatatacggctgactgctgacatgactcggtgcgattaatgcagatggcggaggagcagcagatggctgagctggtcatggcgcagtgcggtggcggtgggcaggggtggcaggagacggaggcgcaggggttcgcgtgggacgcggcggcggcagaccccgggcggctctacgcggcggcgtcgctcaacctattcgacggcgccgggggaagcggctccggcgagccgttcctggcgggagtgcaggaggatggcgcggcgggcgtggggtggcagtacgcggcagagagcagcgagccgccgtcgacggtggcgcaggagcatcagcagctgcacggctcgggcgtggggagggcagattcggggtcggaggggagcgatatgcagctgggagaccccgacgacgaagtcgacggcgagacgcagaggggctccggcaaagacggctgcgggaagcggcagcagtgcaagaacctcgaggcggagcggaagcggcggaagaagctcaacgaacgcctctacaagctccggtccctcgtcccaaacattaccaaggtaatcactatcatccttctatggccgccgccacccgccatgcacgattcttgtaaatttcaaagcgtcgatccatgtcggcagatggaccgggcgtcgatcctcggggacgcgatcgactacatagtggggctgcagaagcaggtgaaggacctgcaggacgagctggaggacccaaacctgccggggatcaccggcggcgacagcaaggcccccgacgtgctcctcgacgaccacccgccgccgggcctcgacaacgacgaggactcgccgcagcagcagccgttcccgtccgccggcggcaagcggctccggaaggaggaggcgggcgacgaggaggagaaggaggcggaggaccaggacatggagccgcaggtggaggtccggcaggtggaggggaaggagttcttcctacaggtgctgtgctcccacaagtccgggcgcttcgtccgcatcatggacgagatcgccgccctcggcctccagattaccagcatcaacgtcacctcctacaacaagctcgtcctcaacgtcttccgcgccgtcgtacgttccgctctcgccggcgatccccgccggccgatcgccattgttgcagcctgccgatagagattcacggtgggctttggttggttcgcagatgaaggacaacgaggcggcggtgccggcggacagggtgagggactcgctgctggaggtgaccagggagatgtacagcgggggcggcacgtggtcgtccccggtccctccgccgccgccgacaaacgcaaagctcgatggcatggacgggcaggcggtgccggcggccgccggggaccactaccagctgcaccaccaggtgctgggaggatatcatcaccagcatctgcagtacctcgccatggattgattcatcatcccctttattacttgctactatcgatcggttcatggatggattagcttttttttttatagaatataaaagagggtgccctctccaatttcattaacgaaaccaaagacaatcattactaccgaaaaaggatttccccgctttatttataaagcaaccaacaccgatcacataggaacgctgcgcgagcagcacaccaagcacacatagcaccgccgcgtaccaagcagcaccacgaagaagaaatgtgatgccgacgacgctgctaaccggaggtgtcctagggtttcccccggcatgctggggggattggggggggggggctgagcaccaccgatacccttcaggaaggagtgtaggcacccgcaggcgtcaccgcgtcgttgctggaagaaccggcagggatttctcccgcacaccaaactccactgtccaaccgatctggagccaaccatccaatttgccgcctaccaacatgtaccaccacggtcttgatgcctcccgcgctactgcactaagatcaccaccacgaggccgagaggacggagagaggagcgccaagatcgggagcggcagcactggaggcccgcgggagggaactacctccactgccgtcgtgcgggaagcccatgcctccaacaccatcgcggtcgccatccggatgcggcaacaggtataccagaccacccttgcccggccaggccaaaaacgggcccgcaaagacggcatcaatgccgccaccaacccaacgccgctcctccgcccctggaagccatgccgacaactcaccccaccgccggcccgcccagacccagatggcctagatctgggccgagcgggtgccgccagatcgcgccgccaacggcagcaccgccgccagcagacccccacgcccgcgactggtcgcccagccaccgcgcaggaccaccgccgcctaggtacattcccatgcgccgccccgccccgcatcagcgtgacactgagaagagaaaggccaggggccatcggcaccgcctgggccaggcccgccgcgggatgccaccgacagcgatgggaaggaacgagctggggaggagccggggatgcgacacggccacgagtggggaggaggggttaaagacaaccatccaatagtttgaagtactatcaaactacctccagctactaagtagtttcgagctagtctaggtaattaataacagggtccaaactgttcggtttagtcccacataggctgtggggggagacataacacgacttataagggcgggggtgtcccctcctaacagactagtcttttgggggaagagggcccaaggcctctcataaatcggtgttg

SEQ ID NO: 44 - DNA, 5669 bp, Triticum aestivum
  source 1..5669: mol_type = unassigned DNA
ttaatagcattagcaaacatttgctgcaacacacgtcaccttccagcgccccaaaaagaataagtgttggaccttccctcgtgtgtggcatgatgatcatattggcatgaccttcctaataataattgacatgcatccattggcaaaacatcatagatggctgtatcactatagtcgccaactagaaaattgacacgcaccttttgagtaacttccaattttcccgactgatataaccagtcgacgcagtgtggttgtgggtgcttccaggtaggcaaagctaaagcatccaccaagcccttgatgactgcattggtgtagcttccaccactgctgaaatttccttatatgccgggtgccaggctcttcgccgagagccaaaacatggacactcggcaaagtaaacaacgccgagagccacactcggcaaacctggcttcatgacaactagttgacgttgccgtcacgcgctcacggcgaacgagcaccgcacggcaaacggggcaggcgctgagagacacgcacggcaaagagaagccacgtggatgcccgttcggaactaacggtgccgtcacttggcttacctataccgagagccgcgacatcgccctcggtaaaaacacatcacagaaacattttactacctgacatgtggtcccactggtcacatttatcaataaaagttttaaattatttggtaaattattaataagaataatatgacgatgtctttgccgagagccatgctcagcaatgcccgaataggacgcggtacaaattatgaagcgcgcgcggtccggcgccccaaatttgcaacgcatgatagtgctttttagcgcgtgctctaaacttttttgcgcgcgcactattttgcaacatctgctagagcgtctccgcgcccaaaaagaacggcttttagcgcgcggagcagtttttgcgcatccgttggagatgctctagaagaaagcaagcatactcatactaaatccatccatccattgctccttccttttcttttcggccgtaagaatttctgttgtgtctgtccttttacatcgtgtgtgaatgatcatgatgaactggctggtgcgtggacggtacagtaacacatttcgtcagcagatatcttcaccagcgaagcagccgatgcaaacagcctccgatgtcactccgtccttctcttagctgcctgggcgaaatgacgtgcttgcctgctcgtgccattagcgtcgctggatcatgagaaagtggcagtgtgcacactgcatccccatgaggtcatgacaccacaccttaccttccatagcagaactgggggcttggcctctcatcagaattgcatcttgcttaactgccattaatcaattgagcgagccacatcatttgcatttgcattggccatctttactggtagagtcaggataaatcaagttttgagatccctcacacctttcttgcaccccacctacccataacagcctccgatcacggcgatgataccagcgcggcgatggataaaaggcgagagcacattcatgctaattgtcaggttttcagttctcaccagtaatataattaggtacttgcatttctgaattgcatccccaaaatggcatagaggtgtatggccctatacatactttgctgatgagtgatgatgcaacacccctgttgcagccttcagttgaagcggttcttcagttagcaattgctttcggctgatccgtcgaccgaccgcgccggaaagcgttctgaaaggtagctttcttctgacaccatccaagaacagctagctataacggcagtcgtgctaggtttatgtaattctgttagctcacacttgattttgatcctctgtttgcttgctgatgatcatgatgaatgcatgcatgatactagtactgtataatgtactacctttgctgcatgcgatcgtgtgtagccctgtgacaccggtgacatcaacaaatcctatcctgattcctgacagcagggaaagccttgcgtgtatgatgtgtcactcacttgctcgatcctaggacaagctgaccactgcgcactggcgctgagctgagcgatggcaggaggagactatcaccagcagagcatcatcggcggccgtgcggctgttcatggccatggagggggaggcggcggcaccgtggaggctgcgctcaggccgctcgtcggcggcgcccacggctgggactactgcatctactggcggctctctcctgaccagcggtatgtgcgtgtgttcgattgttcatgcgattcttgcatgcagccagagcttgatgatgatgatccatcattcatggcaggttcttggagatgacggggttctgctgcagcgcggagttcgaggcgcaggtggccacgctcgccgacgtcccttcctccatccctctcgactcctcctccatcgggtaattgccggccggccaagtcgattgccgttaatttttggccggatctctgactgttgttttggttggttggtcaggatgcacgctcaggccctgctgtcgaaccagccgatctggcagagcagcggcggggcgccgggtccggatctactcacgggctacgaggcttcctccagcggcggcgagaagacacggctcctcgtccccgtcgccggcggcatcgtcgagctcttcgcttcaagatacgtacgtgcgtgcgtgcgtgcgtgcgtggccgatgatgggaaataaaaatatcagttaggtttggaagtagttagggagcacgcggttcccgtgagctgacgcgacggcggcggcaacggcggtgcaccgtacgcaacagccttcgcgtttccatggtgcgtggtgtatatatatggctgacctgactggggtgcgattaatgcagatggcggaggagcagcagatggcggagctggtcatggcgcagtgcggcggcggtgggcagggatggcaggagacggaggcgcaggggtttgcgtgggacgcggcagcggcagacccggggcggctctacgcggcggcgtcgctcaacctgttcgacggcgccgggggaagcggctcgggcgagccgttcctggcgggagtgcaggaggacggcgcggcgggcgtgggttggcagtacgcggcagagagcagcgagccgccgtcgacggtggcgcaggagcatcagcagctgcacggctcgggcgtggggagggcggactcggggtcggagaggagtgacatgcagctgggggaccccgacgacaacgtcgacggcgagacgcagaggggctccggcaaagacggcggcgggaagcggcagcagtgcaagaacctcatcgcggagcggaagcggcgcaagaagctcaacaaccgcctctacacgctccggtccctcgtccccaacatcaccaaggtaatcaccgtcatccatggccgccgccatgcacgattcttggctgcttgaaactaaggagcttcgatccatgtcggcagatggaccgtgcgtcgatcctcggggacgcgatcgactacatcgtggggctgcagaagcaggtgaaggacctgcaggacgagctggaggacccgaacccgccgggggtcaccggcggccacagcaaggcccccgacgtgctcctcgacgaccacccgccgccgggcctcgacaacgacgaggactcgccgcagcagcagccgttcccgtccgccgccggcaagcggccccggaaggtggaggcgggcgaggaggaggagaaggaggcggaggaccaggacatggagccgcaggtggaggtccggcaggtggaggggaaggagttcttcctgcaggtgctgtgctcccacaagtccgggcgcttcgtccgcgtcatggacgagatcgccgccctcggcctccagatcaccagcgtcaacgtcacctcctacaacaagctcgtcctcaacgtcttccgcgccgtcgtacgtcccgctctcgccggggatccccgccgggccgatcgccattgttgcatcctgctgatagggattcatggttggtttgcagatgaaggacaacgaggcggcggtgccggcggacagggtgagggactcgctgctggaggtgacgagggagatgtacggcgggggcggcgcgtggtcgtccccgctccccccgccgccgccgacgaacgcgaagctcgatggcatggacgggcaggcggtgccggcggcggccggggaccactaccagctgcaccaccaggtgctgggaggatatcaccaccagcatctgcagtacctcgccatggattgattgattccctttattactagccactataggtccatggatggattagttgatatagtacgtaattagttcccttcctgctcgtattttgttttctctttcatttaaatatgtgaagtttaactaattaactcgaggagaggacaatgaaatcaaattcgaaagcttctggccgaaagtctcggatcattctcacctctttgtggatctggacgcggactttcatgtgggcaagcgcttcaaattcgaaagcttctggccgaaagccgagggctttcttgacgtagtgcaggaggcatggaatgtggtgccgtcggaagggaaccctttcttggccctggataacaaactgcatgcgacggccaaagcattgcaaacgtggagtgacaagtggattgggaatgttaagctccaaatttccttggcgatggagatcattggacggcttgacaaggcagcagactcgcgccagctggcggacgacgaacatggattaaggaagttgctgaagagggatcttcttggcctctgctcgctcgagagatccattgcgaggcagagatcacggatttggcaacttaaagagggggaggcgaacacggctttcttccagcgacaggcaagattcaggcaaaagaagaatgtgatcacttctttgagccacgagggggtgctatacactgggcaggagagcatagcgaaggtggtggatgactactacgatgcattatttggttcttcggctcggcggttggcctcgatcaacttggacatgcttgatctcccatatatggatctcgcacacctcgaggcccagtttgaggaagaggaggttgagaaaattatcaaagcaatgccattggacaaggcaccaagcccggacggtttcactggccgttttctttgtgtcatgttggcacataatcaaagatgattttatgaaggctctgcggcagttccatgcgggagacatgagagggttggcttccatcaacaaggcgctggtttccctcctccccaagatccagggagcggtggatgtgaaagattttagaccggtgagccttataagtggaccagtgaagatcttcgacaaaattctggcaaccaggcttgcggaggacctgccaaggttggtggggcaccaccagagtgcatttgtgcgtggcagatcgcttcatgacaactatatgttggtgcaatgcacggctaggagattgcatgcgatgagacatccggcagtcctacttaaacttgacatcacgaaagcattcgatacaatccagtggccttttctacttcaggtgttgcggaggttgggattcggagccaaatggattgcatggatttgtggactgttggccacctcctccacgaggatcacggttaatggcttgcctggt

SEQ ID NO: 45 - DNA, 5049 bp, Triticum aestivum
  misc_difference 1300..1353: note = a, c, t, g, unknown or other
  source 1..5049: mol_type = unassigned DNA
cattgagacaagggagatgtcatgaaactcaagcataaacaagttacttgtctgatttcaaattgattgtggtactatcagttattctgtagtccatggctttaatccagaactgttagttatattttaaatcctaatcagttcatcactgacattgatctacctataaccctggtgaaaatgcaaaacatgaagatttagtgtttgaataccacttatcataaattatacgaaatctgaaggtatgacgccaccacattagtgacattataggagattacaatcaatcctaacaaatcctataccaccataacagccagatacactaacagacctgccatttctatcatgctcatccctcagtctcttgaagcggcaagcttactagaaaagcagatttaatgctacatatatattctggtggaagtttttctttaaatgtaactacagacttgatactcgataatctgtaccatgaaggtgaagatgtctaaatatttcatattttagtaaaccaagaacatcacaccaatatatacaaaaacatagataatcaaaagaataaggctgatatgaatattccataatacaagatcatgtgctctttggatacttgcaattctgtaggtagttgtagcacaccagtgcattcataaaatatggtaagggggcagaaggcatgacctacatttctcaacttcctgtgggtgaataacatcaaagatgccaaattcaaagggtgtgagctttccgtctttctcgtgtctgtctcctaataataacagaaacaataataaccatatgatagtcctttgcattgacctttagtatgggcgcattctgttattttctgccccatcatttttgtgtgacaaccaaattatggtttcatgacttaccgctataatattcttggcatagcacagaaactaggcttcatgggtcttcgagttgcagcttcatgaacaaagcctcgctcattcaatcatcagctgtaccaaaaagataggtatgttcacctctagtgcttattgctactgttcgctagatgtgatccctgattaacagttgctttttaagtcttagttggtgagattaaacatcaaaagattcagacaccatggatttcatgtgcttcattttactgatcatcttgcacttactgagttgtattaccattacaaattattccgtgctactaaacattttgctgattggctactgagcatgtggtagttgaagcacattgtatcaaacatcaaatatgaataggattagggaacagaaaaagatggtaagnnnnnnnnnnnnnnnnnnnnnnnnnnnnnnnnnnnnnnnnnnnnnnnnnnnnnnttggaggtgactattttgaaggttcccatgatcacaatctcatgacaggatctttgacccatgattcttctctggctcctaaatgcaacgacaacacaaatattgagctacagagattcaaggtgcagtcgttttctgcagatatcctttctgattcgaccaatctttcttctgaagctgcaagagcaatcaaccaccttcagcatcaactaggaattggtttggagcaggatatgcgaccagtggaaactgcgacctgggatacttctatctgcaccattcaagaccaaataatcaaccatcagcttagcgaagatccacaaaacatattggtgcaacaacagattcaacagtatgatgctgcgctttatccaaacagtggttacacaccagcacctgatctcttaaaccttctccactgcactgtggctccagtgttccctccaacagcatcagtttttggtgatacagcactaagtggtggtaccaactatttggatcttaatgatgagtttacaggagtggcagcaattcctgacagtggattaatgtacactagtgatccggcattgcagttagggtaccatgctgcccagtctcacgcactaaaggatatctgccattcactgccgcaaaattatgggctgttccccagtgaggatgaaagagatgccatccttggggttggaagtgtcggaggagatctttttcaggatatggatgacaggcaatttgatactgtactggagggcagaagagggaagggtgacttcggaaagggaaaaggaaaagctaactttgcgacagagagagagaggagggaacagctaaatgtgaagtataagactttaagaatgctcttccccaatcctaccaaggtttgtcttgttcatcattttgcacgtttaggagatttgatgattatcagatgtccagaatagtcaactatagaagctaatcactagggtttgttcaatgacgctacatgtacagaatacttcattaatagaagctaacaattaaaatttcaggccactttccagttttcattggttttgtgaagataattgaatttctgaataacttcatccatttactctcagtgtgttaagacacttagaagtggcaacaccaaagtactatgcagtccgataaaccagtgctttataaaacatcaacaaaaacccattcgcaaaactgtcatctgtctgatgtagattcaaagaaacatgtgttagataatatgcttctgctgaactttctgtcgaatagttctcaagctctgttgctacattatattcaggttgatactgatatcctatgaaacatgattgctatgaactagttgctcgttgtgctctttgcagatacttaccccattatcttgatcgagtgtgtttgtaccttctagttaattatgaaagaaaatgaaagcaatcaatattccatatgtatattgatttttttcataagtattattgtcctcattgcactactctccagcaaagtattgacctctatagtgatctaaccttaaccgattagacaacacttcctgatttactcaatgaaaacgtaaacaatgtgacagaatcataaaaatctaggttgcaccttttggggctactgctcatatatgtttgatatggcactaatgtgttaccgaactgttctctagaatgacagggcttcagtagtaggtgatgccattgaatacatagatgagctgaatcgaacagtgaaggaactgaagatcctagtggaacagaagtggcatgggactaataggagaaagataagaaagttggatgaagaggccgctgctgatggtgaaagctcatcgatgaggccaataagggatgagcaagacaatcagcttgatggggccataagaagctcatgggttcagaggaggtccagggagtgccatgttgatgttcgcatagtggaaaatgaaataaacatcaagctcacagaaaagaagacgaccaactcctccctgcttcatgttgcaaaggttcttgatgaattccatcttgagatcatccatgtggttggagggattattggtgatcactacatattcatgtttaacactaaggtattgacagtattatttattttaagtagcatcaggaactcctttccccatattgccgattgtcattgacagtaatgttccatcatccacaataatgcaggtgtctgaaggttcctcaatttatgcttgtgcagtggcaaagaggatccttcaagcagtggatgcacaacaccaggcacttgacatattcaactaggcattagcacccatagtaactatttgaagaagttcctagtctactactctccctggggagagtcgtaattttattttctgtcagtctatccgtgaggaaagttattagaacaggcttggagagaactttgtctttaccattagctagctcggaaaacaaaacaaaatctggcatgcctaactgtttactgttatcacttatctagctctaccagaaatgatttgactctctgcctcagtatttgcttccatcatcttttcgtctcatttcatttggagttggcttcaaaatatagtactccctccgatccatattaatcgtcgctgatttagtataatgttgtactaaatcagtgacaattaaatatggatcggagggagtagaagatgatgatttacacatgtctgcatggcctactatgttctcttttacagaaagtggcttagtgagttgcattcactggtaccagtatcacatctcataggatgctacatgcatatgaaaacttcgcagatatccaaaatctgtgcagaacttctacaagctgggccgaatcgctaggtaaatcgagttgcattgtgcgtgataattcgtgtgtagaggaatatgccacccaatagttctcaaaaccattgtcttagcaacgagatgagaaaaaggtatgacggtacggtcttacattcttgctatccgtgcagcagatctgctctgctcgactcgtacaatgtcccgaacacctcgcgggcaccaccccgcccccgcaacggcaaagctccggtcacggccaacacgcgaattgcagtgacgcaggaacagcacgagatgtgatgccgcccgtggcactctgcgccagaccagaatcagatcaggggactgaacatttccaacctgcaatcgtattcttgcaaagaacaacattttaccggtgagatctgcagggcccgggcgtgcgtccgctgcttgcttccgcgcagctcccgcaccgtcgatgctgctcgtggaaccgctgctcgcgtgcagacgtgctagggcaccaaaggctctccagctacgggagggcacgcctgtggttcaggtcgccgaggaagggggagaggaggattgcacgagcacttaccaggtggcaaaagaaaagaaacctgttagccgcaaatttcgtccctatcagcggacacggatcagtccgcgaacacggaaggccgcatacattttggtaacgataaaaactacctggaggaaattcgatcaaatatgaatttaatttaaacatgacggttttgttacatttacatcaactaagcgtagattgtcagttcctcatgtccgatcatgaacaagagaactgaagcttcaccgtctccacttccgcttcggtgctctccagctccgcctccgtaac

SEQ ID NO: 46 - DNA, 6114 bp, Triticum aestivum
  misc_difference 419: note = a, c, t, g, unknown or other
  misc_difference 748..1226: note = a, c, t, g, unknown or other
  misc_difference 2465..2470: note = a, c, t, g, unknown or other
  source 1..6114: mol_type = unassigned DNA
caaatataacccaggtgaaaatgcaaaacatgaagatttagtgtttgaataccacttatccataaattatacgaacgtacaacagaatctgaaggtatgatgccaccgcattagtgacatcataggagataacaatcaatcctaacaaatcctataccaccataacagccagatacactaacagacatgccatttttatcatgctcatccctcatttttaccatggaagccattttcttggtacgacaacttatggagagatatagggagcataagaaggacttgcatatggtgttcattgacttggagaaggcctatgataagataccgcggaatgtcatgtggtgggccttggagaaacacaaagtcccagcaaagtacattaccctcatcaaggacatgtacaataatgttgtganaaacacaaagtcccagcaaagtacattaccctcatcaaggacatgtacaataatgttgtgacaagtgttcgaacaagtgatgtcgacaccgatgacttcccgattaagataggactgcatcaggggtccgctttgagcccttatctttttgcattggtgatggatgaggtcacaaggggtatacaaggagatatcccatggtgtatgctctttgcggatgatgtggtgctagttgacgatagtcggacgggggtaaataggaagttagagttatggagacagaccttggaatcgaaagggtttaggcttagtagaactaaaaccgagtnnnnnnnnnnnnnnnnnnnnnnnnnnnnnnnnnnnnnnnnnnnnnnnnnnnnnnnnnnnnnnnnnnnnnnnnnnnnnnnnnnnnnnnnnnnnnnnnnnnnnnnnnnnnnnnnnnnnnnnnnnnnnnnnnnnnnnnnnnnnnnnnnnnnnnnnnnnnnnnnnnnnnnnnnnnnnnnnnnnnnnnnnnnnnnnnnnnnnnnnnnnnnnnnnnnnnnnnnnnnnnnnnnnnnnnnnnnnnnnnnnnnnnnnnnnnnnnnnnnnnnnnnnnnnnnnnnnnnnnnnnnnnnnnnnnnnnnnnnnnnnnnnnnnnnnnnnnnnnnnnnnnnnnnnnnnnnnnnnnnnnnnnnnnnnnnnnnnnnnnnnnnnnnnnnnnnnnnnnnnnnnnnnnnnnnnnnnnnnnnnnnnnnnnnnnnnnnnnnnnnnnnnnnnnnnnnnnnnnnnnnnnnnnnnnnnnnnnnnnnnnnnnnnnnnnnnnnnnnnatggacaggggtgcgtggaagcttgctatccatgtgccagagccatgagttggttgcgagatcttatgggtttcacctctagcctaccccaacttgtttgggactaaaggctttgttgttgttgttatccctcagtttcttgaagcggcgagcttactagaaaagcagatttaatgctacatatatattctggtggaagtttttctttaaatgtaactacacacttgatactcgataatctgtaccatgaaggtgaagatgtctaaatttttcatattttagtaaaccaagaacatcacaccaatatatacaaaaacatagatatagataatcaaaagaataaggctgatatgaatattccataatacaagatcatgtgctctttggatacttgcaatcttgtaggtagttgtagcacaccagtgcattcataaaatatggtaagggggcagaaggcatgacctacatttctcaacttcctatgggtgaataacatcaaagatgccaaattcaaagggtgtgagctttccgtctttctcgtgtctgtctcctaataataacagaaacaataataaccatatgatagtcctttgcattgacctttagtatgggcgcattctgttattttctgtcccatcatttttgtgtgacaaccaaattagggtttcatgacttaccgctataatattcttggcatagcacaggaactaggcttcatgggtcttcgagttgcagcttcatgaacaaagcctcgctcattcaatcatcagctgtaccaaaaagataggtatgttcacctctagtgcttattgctactgttcgctagatgtaattcctgattaacagttgcttctttaagtcttagttggtgagattaaacatcaaaagattcagccaccatggatttcatgtgcttcattttactgatcatcttgcacttactgagttgtattaccattacaaattattctgtgctactaaacattttgctgattgcctactgagcatgtggtagttgaagcacattgtatcaaacatcaatatgaataggattagggaacagaaaaagatggtaaggggtttgttaggtctggaacaagcaaagttgcttcatgtcttattaatcatcctatatgggacttctctacacggaagaacagacagccacattgcatagcttaaaactccacggctctacctcttttgcaacaaccaaaacagccaggccaactgcaattnnnnnncatgattcttctctggctcctaaatgcaacgacaacacaaatattgagctacagagattcaaggtgcagtcgttttctgcagatatcctttctgattcgaccaatctttcttctgaagctgcaagagcgatcaaccacctccagcatcaactaggaattggtttggagcaggatatgccgccagtgggaactgcgacctgggatacttctatctgcaccattcaagaccaaattatcaaccatcagcttagcgaagatccacaaaacatattggtgcaacaacagattcaacagtatgatgctgcgctttatccaaacagtggttacacaccagcacctgatctcttaaaccttctccactgcactgtggctccagtgttccctgcaacagcatcagtctttggtgatacagcactaagtggtgataccaactatttggatcttaatggtgagtttacaggagtggcagcaattcctgacagtggattaatgtacactagtgatccagcattgcagttagggtaccatgctgcccagtctcacgcactaaaggatatctgccattcactgccgcaaaattatgggctcttccccagtgaggatgaaagagatgtcatgcttggggttggaagtgtcggaggagatctttttcaggatatagatgacaggcaatttgatactgtactggagggcagaagaggaaagggtgagttcggaaaaggaaaaggaaaagctaactttgcgactgagagagagaggagggaacaactcaatgtgaagtataagacgttaagaatgctcttccccaaccctaccaaggtttgtcttgttcatcattttgcacatttaggagagttaatgattatagatgtccagaatagtcaactatagaagctaatcactagggtttgttcaatgatgctacatgtacagaatacttcattaatagaagctaacaattaaaatttcaggccactttccagttttcgttggttttgtaaatataattgaatttctgaataacttcacccatttattctcggtgtgttaagacgctcagaagtggcaacaccaaagtactatgcagtccaataaacctgtgcttcataaaacatcaacaaaaactcattcgcaaaactgtcatctgtctgatgtagattcaaagaaacatgtgttagataatatgcttctgctgaactttctgtcgaatagttcttcaagctctgttgccacattatattcaggctgatactgatatcctatggaacatgattgacatgaaatagttgctcgtcgtgctgctctttgcagatacttttagtggcatactatttaccccatttatcttgatcgagcgtgttagtaccttctaattaattatgaaagaaaatgaaagcaatcaatatttcatatgtatattgattttttttcataagacagtattattgtcctcattgcactactctccagcaaagtattgacctctatagtgatctaaccttaaccgattaaacaacacttcctgatttactcaatgaaaacataaacaatgtgacagaaccataaaaatctaggttgcaccttttgggggtactgctcatatatgtttgatatggcactaatgtattacagaactgttctctagaatgacagggcttcagtagtaggtgatgccattgaatacatagatgagctgaatcgaacagtgaaggaactgaagatcctagtggaacagaagtggcatgggactaataggagaaagataagaaagttggatgaagaggcggctgctgatggtgaaagctcatcgatgaggccaatgagggatgagcaagacaatcagcttgatggggccataagaagctcatgggttcagaggaggtccagggagtgccatgttgatgttcgcatagtggaaaatgaaataaacatcaagctcacagaaaagaagaagaccaactcctccctgcttcatgttgcaaaggttcttgatgaattccatcttgagatcatccatgtagttggagggattattggtgatcactacatattcatgtttaacactaaggtattgatagtattatttattttaagtagcatcaggaactcctttcccgatattgctgattgtcattgacagtaatattccatcatccacaataatgcaggtgactgaaggttcctcagtttatgcttgtgcagtggcaaagaggatccttcaagcagtggatgcacaacaccaggcacttgacatattcaactaggcattagcaaccatagtaactatttgaagaagtgcctagtttactactctccctggagagagtcgtaattttcttttctgttagttctgtccgtgaggaaagttattagaccaatattggagagaactttgcctttaccattagctagctcagaaaatcaaaaaaatctggcatgccttaactgttcactgttatcacttatctagctttactagaaatgatttgactctttgcctcagtatttgtttccatcatcttttcatctcatttcatttggagttggcttcaaaatatagtaaatcagcgacaattaatatggatcggagggagtagaagatgatgatttacacatgtctgcatggcctactatgttctcttttacagaaagtggcttagtgcgttgcattcactggcatcagtatcacatctcataggatactactacatgcatatgaaaacttcgcagagatccaaaatctttgcagaacttttacaagctgggccgctaggtaaatcgagttgcattgcgcgtgataattcgtgcatagaggaatatgccgcccaatagttgtcaaaaccattgtcttagctacaagatgagaaaaacgtacaacggtatggtcttacattctttagtcccatgccatcacagagttaggccacgagcaacacacacgcaacaatgcgaatgtatgacaatccaacgctgcggggaaggagagatggcaatagatcagcatccttacctcgcaccaatgcccctgcgtccgtgccaatgcagcagatctgctctgctcgactcgtgcaatgccccgaacacctcgcgagcaccgtcccgcccccgcaacggcaaagagccacaagcgaattgcagccacgcaggaacggcacgagatgtgatgccgtccgtggcactctgcgccagaccagaatcagatcaggggactgaacatttccaacctgcaatcatattcttgcaaacaacaacattttaccggtgagatctgcaggacccgggcgtgcgcccgctgcttgcttaggcagctcccgcaccgtcgatgctgctcgtggaacggctgctcgcgtgcagacgtgctagggcaccagaggctctcgagctacgggagggcacgcctgtggttcagcgaggaaggggaagaggaggagtgcaggagcacttaccaggtggcaaaagaaaagaaacctgttagccgcaagcttcgtccccatccgtccgcggacacgggatcagtccgcgaatacagatgcacaaaaccgccatccaacgctgactatatgcattttaacaacgactcaaattaaccgaacgaaattcgatcgaacacgattgaatttcatataaatacgatcggatttcat

SEQ ID NO: 47 - DNA, 5088 bp, Triticum aestivum
  misc_difference 1015..1338: note = a, c, t, g, unknown or other
  source 1..5088: mol_type = unassigned DNA
gacgctcgcgccgacccaaacacagcgccggacgtttgtgtccgccgggccgacccaaacggacaaaagcgccgtccgtttgggtcggcccgttggagttgctctaaggtaaaaagtctaaacttatcatattttagcaaaccaagaacatcacaccaatatatacagaaacacagatcctcaaaagaataaggctgatatgaatattccataatacaagatcatgtattctttggatacttgcaatcttgtaggtagttgtagctctactttctgagagaataactacaccagtgcattcataaaatatggtaagggggcagaaggcatgacctacatttctcaacttcctatgggtgaataacatcaaagatgccaaattcaaagggtgtgagctttccgtctttctcgtgtctgtctcctaataataacagaaacaataataaccatatgatagtcctttgcattgacctttagtatgggcgcattctgttattttctgtcccatcatttttgtgtgacaaccaaattatggtttcatgacttaccgctataatattcttggcatagcacaggaactaggcttcatgggtcttcgagttgcagcttcatgaacaaagcctcgctcattcaatcatcagctgtaccaaaaagataggtatgttcacctctagtgtttattgctaatgttcgctagatgtaattcctgattttgcttctttaagtcttagttggtgagattaaacatcaaaagattcagccaccatggatttcatgtgcttcattttactgatcatcttgcacttactgagttgattaccattacaaattattccgtgctactaaacattttgctgattggctactgagcatgtggtagttgaagcacattgtatcaaacatcaaatatgaataggattagggaacagaaaaagatggtaaggggtttgttaggtctggaacaagcaaagttgcttcatgtcttattaatcatcctatatgggacttctctacnnnnnnnnnnnnnnnnnnnnnnnnnnnnnnnnnnnnnnnnnnnnnnnnnnnnnnnnnnnnnnnnnnnnnnnnnnnnnnnnnnnnnnnnnnnnnnnnnnnnnnnnnnnnnnnnnnnnnnnnnnnnnnnnnnnnnnnnnnnnnnnnnnnnnnnnnnnnnnnnnnnnnnnnnnnnnnnnnnnnnnnnnnnnnnnnnnnnnnnnnnnnnnnnnnnnnnnnnnnnnnnnnnnnnnnnnnnnnnnnnnnnnnnnnnnnnnnnnnnnnnnnnnnnnnnnnnnnnnnnnnnnnnnnnnnnnnnnnnnnnnnnnnnnnnnnnnnnnnnnnnnnctggctcctaaatgcaacgacaacacaaatattgagctacagagattcaaggtgcagtcgttttctgcagatatcctttctgattcgaccaatctttcttctgaagctgcaagagcaatcaaccacctccagcatcaactaggaattggtttggagcaggatatgccaccagtggaaactgcgacctgggatacttctatctgcaccattcaagaccaaataatcaaccatcagcttagcgaagatccacaaaacatattggtgcaacaacagattcaacagtatgatgctgcgctttatccaaacagtggttacacaccagcacctgatctcttaaaccttctccactgcactgtggctccagtgttccctgcaacagcatcagtctttggtgatacagcactaagtggtggtaccaactatttggatcttaatggtgagtttacaggagtggcagcaattcctgacagcggattaatgtacactagtgatccggcattgcagttagggtaccatgctgccccgtctcacgcactaaaggatatctgccattcactgccgcaaaattatggactgttccccagtgaggatgaaagagatgtcatgcttggggttggaagtgtcggaggagatctttttcaggatatggatgacaggcaatttgaaactgtactggagggcagaagagggaagggtgagttcggaaagggaaaaggaaaagctaactttgcgactgagagagagaggagggaacagctaaatgtgaagtataagactttaagaatgctcttccccaatcctaccaaggtttgtcttcttcatcattttgcaaatttagatgatttaatgattgttggatgtccagaatagtcaactatagaagctaaccactagggtatcttcaatgatgctagatgtacgtaatacttaattaatagaagctaacaattcaaatttcaggccactttacagttttcattgttttgtgaagataattgaatttctgaataacttcatccatttattctcacttctcagtatgttaagacactcagaagtggcaacaccaaagtactatgcagtccaataaacccatgctttataaaacatcaacaaaaacccattcgcaaaactgtcatctgtctgatgtagattcaaagaaacatgtgttagataatatgcttctgatgaactttctgtcgaatagtccttcaagctctgttgctacattatattcaggctgatactgatatccaatggaacacaattgctatgaaatagttgctcattgtgctgctctatagtgacatactattaccccatttatcttgatcgagtctgttagtaccttctagttaattatgaaagaaaatgaaaacaaccaatatttcatatgtatattaattttttcataagacagtattattgtcttctgcactactctccagcaaagtattgacctctctggtgatctaaccttaaccgattagacaacacttcctgatttactcaacgaaaacgtaaacaatgtgacagaaccacaaaaatcttggttgcaccttttggggtactgctcatctatgtttgatattgcactaatgtgttacagaactgttctctagaatgacagggcttcagtagtaggtgatgccattgaatacatagatgagctgaatcgaacagtgaaggaactgaagatcctagtggaacagaagtggcatgggactaataggagaaggacaagaaagttggatgaagaggcggctgctgatggtgaaagctcatcgatgaggccaatgagggatgagcaagacaatcagcttgatggggccataagaagctcatgggttcagaggaggtccagggagtgccatgttgatgttcgcatagtggaaaatgaaataaacatcaagctcacagaaaagaagaaggccaactcctccctgcttcatgttgcaaaggttcttgacgaattccatcttgagatcatccatgtggttggagggattattggtgatcactacatattcatgtttaacactaaggtattgatagtattatttattttaagtagcatcaggaactcctttccacatattgccgattgtcattgacagtaatgttccatcatccacaataatgcaggtgactgaaggttcctcagtttatgcttgtgcagtggcaaagaggatccttcaggcagtggatgcacaacaccaggcacttgacatattcaactaggcattagcaaccatagtaactatttgaagaagtccctagtctactactctccctggggagagtcgtaattttattttctgtcagttctgtccgtgaggaaagttatcagaccaggcttggagagaactttgtctttaccattagctagctcggaaaacaaagaaaatctggcatgtcttaactgtttacggatatcacttatctagctttactagaaatgatttgactctttgcctcagtatttgcttccatcatcttttcgtctcatttcgtttggagttgacttcaaaatatagtaccaagatgatgatttacacatgtctgcatggcccactatgtactcttttacagaaagtggcttagtgtgttgcattcactggtatcggtatcacatctcataggatattacatgcatatgaaaacttcgcagagatccaaaatcagtgcagaactttcacaggctgggccgaatcgctaggtaaatcgagtcgcattgcgcgtgataatccgtgcgtagtggaatatgccacccaatactccaatagttgtcaaaacaattgtcttagctacaagatgagaaaaaggcatgacggtacggtcttacattcttagtcccatgccatcacagagttgggacacgagcaacacacacccaacaatgcgaatgtatgacaaatccaacgctgcggggaagcagagatggcaatagatcagcatccttacctcgcgccaatgcccctccgtccgtgccaatgcggcagatctgctctgctcgactcgtgcaatgccccgaacacctcgcgggcaccaccccgtccccgcaacggcaaagccccggtcacggcccacaagcgaattgcagtcacgcaggaacggcacgagatgtgatgccgtccgtggcactctgcgccagaccagaatcagatcaggggactgaacatttccaaactgcaatcatattcttgcaaacaacaacattttaccggtgagatctgcaggacccgggcgtgcgtccgctgcttgcttcggcagctcccgcaccgtcgatgctgctcgtggaacggctgctcgcctgcatacagtgctagggcactagaggctctcgagctacgggagggcacgcctgtggttcaggtcgccgaggaaggggaagaggaggagtgcacgagcacttaccaggtggcaaaagaaaataaacctgctagagcatctccaatggcaatccgtaaattttgtcccgcacctgtctgcggatagaggatcagtccgccatcacggatgcaggaggccgtcatccaacgctagccgcatacattttggcaacgactcaaactaatcggacgaaattcgattaaacacgaccggatttcattacatttacatcaactaagcgtagctcatccggctaggtctaaatggtcggcgacgcccgttccccgtgtccgcacatgaaccaagagaactcaagtttcaccgtctctagttctgcctcagtgctctccagctccg

SEQ ID NO: 48 - DNA, 900 bp, Triticum aestivum
  source 1..900: mol_type = unassigned DNA
aactgcgacctgggatacttctatctgcaccattcaagaccaaataatcaaccatcagcttagcgaagatccacaaaacatattggtgcaacaacagattcaacagtatgatgctgcgctttatccaaacagtggttacacaccagcacctgatctcttaaaccttctccactgcactgtggctccagtgttccctccaacagcatcagtttttggtgatacagcactaagtggtggtaccaactatttggatcttaatgatgagtttacaggagtggcagcaattcctgacagtggattaatgtacactagtgatccggcattgcagttagggtaccatgctgcccagtctcacgcactaaaggatatctgccattcactgccgcaaaattatgggctgttccccagtgaggatgaaagagatgccatccttggggttggaagtgtcggaggccgctcgtcggcggctcccacggctgggactactgcatctactggcggctctctcctgaccagaggttcttggagatggcggggttttgctgcagcgccgagttcgaggcgcaggtggccacgctcgccgacgtgccttgctccatccctcttgactcctcctccgtcgggatgcacgctcaggcgctactgtcgaaccagccaatctggcagagcagtggcgggtcgccgggcccggatctcctcacgggctacgaggctgcctccagcggcggcgagaagacgcggctcctcgtccccgtcgccggcgggatcgtcgagctcttcgcgtcgagatatatggcggaggagcagcagatggctgagctggtcatggcgcagtgcggtggcggtgggcaggggtggcaggagacggaggcgcaggggttcgcgtgggacgcggcggcg

SEQ ID NO: 49 - DNA, 450 bp, Triticum aestivum
  source 1..450: mol_type = unassigned DNA
aactgcgacctgggatacttctatctgcaccattcaagaccaaataatcaaccatcagcttagcgaagatccacaaaacatattggtgcaacaacagattcaacagtatgatgctgcgctttatccaaacagtggttacacaccagcacctgatctcttaaaccttctccactgcactgtggctccagtgttccctccaacagcatcagtttttggtgatacagcactaagtggtggtaccaactatttggatcttaatgatgagtttacaggagtggcagcaattcctgacagtggattaatgtacactagtgatccggcattgcagttagggtaccatgctgcccagtctcacgcactaaaggatatctgccattcactgccgcaaaattatgggctgttccccagtgaggatgaaagagatgccatccttggggttggaagtgtcgg

SEQ ID NO: 50 - DNA, 450 bp, Triticum aestivum
  source 1..450: mol_type = unassigned DNA
aggccgctcgtcggcggctcccacggctgggactactgcatctactggcggctctctcctgaccagaggttcttggagatggcggggttttgctgcagcgccgagttcgaggcgcaggtggccacgctcgccgacgtgccttgctccatccctcttgactcctcctccgtcgggatgcacgctcaggcgctactgtcgaaccagccaatctggcagagcagtggcgggtcgccgggcccggatctcctcacgggctacgaggctgcctccagcggcggcgagaagacgcggctcctcgtccccgtcgccggcgggatcgtcgagctcttcgcgtcgagatatatggcggaggagcagcagatggctgagctggtcatggcgcagtgcggtggcggtgggcaggggtggcaggagacggaggcgcaggggttcgcgtgggacgcggcggcg

SEQ ID NO: 51 - DNA, 23 bp, Triticum aestivum
  source 1..23: mol_type = unassigned DNA
ggtgagtgagtgtgtgcgtgtgg

SEQ ID NO: 52 - DNA, 23 bp, Triticum aestivum
  source 1..23: mol_type = unassigned DNA
ccacacgcacacactcactcacc

SEQ ID NO: 53 - RNA, 20 nt, synthetic construct
  misc_feature 1..20: note = Description of Artificial Sequence: Syntheticoligonucleotide
  source 1..20: mol_type = other RNA
ggtgagtgagtgtgtgcgtg

SEQ ID NO: 54 - DNA, 450 bp, Triticum aestivum
  source 1..450: mol_type = unassigned DNA
aggccgctcgtcggcggctcccacggctgggactactgcatgtactggcggctctctcctgaccagaggttcttggagatggcgggtttttgctgcagcgccgagttcgaggcgcaggtggccacgctcgccgacgtcccttgctccatccctcttgactcctcctccatcgggatgcacgctcaggcgctactgtcgaaccagccaatctggcagagcagcggcggggcgccgggtccggatctcctcacgggctacgaggctgcctccagcggcggcgagaagacgcggctcctcgtccccgtcgccggcgggatcgtcgagctcttcgcgtcgagatatatggtcgaggagcagcagatggcggagctggtcatggcgcagtgcggtggcggtgggcaggggtggcaggagacggaggcgcaggggttcgcgtgggacgcggcggcg

SEQ ID NO: 55 - DNA, 450 bp, Triticum aestivum; identical to SEQ ID NO: 50
  source 1..450: mol_type = unassigned DNA

SEQ ID NO: 56 - DNA, 450 bp, Triticum aestivum
  source 1..450: mol_type = unassigned DNA
aggccgctcgtcggcggcgcccacggctgggactactgcatctactggcggctctctcctgaccagcggttcttggagatgacggggttctgctgcagcgcggagttcgaggcgcaggtggccacgctcgccgacgtcccttcctccatccctctcgactcctcctccatcgggatgcacgctcaggccctgctgtcgaaccagccgatctggcagagcagcggcggggcgccgggtccggatctactcacgggctacgaggcttcctccagcggcggcgagaagacacggctcctcgtccccgtcgccggcggcatcgtcgagctcttcgcttcaagatacatggcggaggagcagcagatggcggagctggtcatggcgcagtgcggcggcggtgggcagggatggcaggagacggaggcgcaggggtttgcgtgggacgcggcagcg

SEQ ID NO: 57 - DNA, 450 bp, Triticum aestivum; identical to SEQ ID NO: 49
  source 1..450: mol_type = unassigned DNA

SEQ ID NO: 58 - DNA, 450 bp, Triticum aestivum
  source 1..450: mol_type = unassigned DNA
aactgcgacctgggatacttctatctgcaccattcaagaccaaattatcaaccatcagcttagcgaagatccacaaaacatattggtgcaacaacagattcaacagtatgatgctgcgctttatccaaacagtggttacacaccagcacctgatctcttaaaccttctccactgcactgtggctccagtgttccctgcaacagcatcagtctttggtgatacagcactaagtggtgataccaactatttggatcttaatggtgagtttacaggagtggcagcaattcctgacagtggattaatgtacactagtgatccagcattgcagttagggtaccatgctgcccagtctcacgcactaaaggatatctgccattcactgccgcaaaattatgggctcttccccagtgaggatgaaagagatgtcatgcttggggttggaagtgtcgg

SEQ ID NO: 59 - DNA, 450 bp, Triticum aestivum
  source 1..450: mol_type = unassigned DNA
aactgcgacctgggatacttctatctgcaccattcaagaccaaataatcaaccatcagcttagcgaagatccacaaaacatattggtgcaacaacagattcaacagtatgatgctgcgctttatccaaacagtggttacacaccagcacctgatctcttaaaccttctccactgcactgtggctccagtgttccctgcaacagcatcagtctttggtgatacagcactaagtggtggtaccaactatttggatcttaatggtgagtttacaggagtggcagcaattcctgacagcggattaatgtacactagtgatccggcattgcagttagggtaccatgctgccccgtctcacgcactaaaggatatctgccattcactgccgcaaaattatggactgttccccagtgaggatgaaagagatgtcatgcttggggttggaagtgtcgg

SEQ ID NO: 60 - protein, 250 aa, Triticum aestivum
MNSTLFIIGIIGNIISVLVFVSPIPTFWRIVRSRSTEDFEAAPYVLTLLNTLLWLYYGFTKPDGLLIATVNGFGAVMETIYIVLFLVYAADHAKRVKTTKLVAALDIGFFGVVFATTTFAIRGLDMKIVVIGLICACLSVFMYGSPLAAVRRVIASRSVEYMPFFLSFFLFLNGGVWAMYAILDKDVFLGVPNGIGCFLGGIQLVIYAVYRNSKVGCQSQGTHEASYDASTSLLSSYADTHGQNDVSTHV

SEQ ID NO: 61 - DNA, 753 bp, Triticum aestivum
  source 1..753: mol_type = unassigned DNA
atgaactccactctgttcatcatcggcatcataggaaacatcatctcggttctggtctttgtttctcccatccccacattctggaggatcgtgaggagcaggtcgacggaggacttcgaggcggcgccgtacgtcctcacgttgctcaacacattgctatggctatactacggcttcaccaagcctgacggcctgctcatcgccacagtcaatggcttcggcgctgtcatggagaccatctacatcgtcctcttccttgtctacgcggccgatcatgccaaaagggttaaaaccacaaagttggtggcagctttggacattggattttttggggtcgtgttcgcgaccacaacattcgccattcgtgggcttgacatgaaaatcgtggtcattggattgatatgtgcttgccttagcgtgttcatgtatgggtccccactcgctgccgtgagaagggtgatcgcctcgaggagcgtggagtacatgcccttcttcctctccttcttcctcttcctcaacggaggcgtctgggccatgtatgccatactcgacaaagatgtcttcctcggggtcccaaatgggataggttgcttcttgggaggtatccagctggttatctacgcggtgtataggaacagtaaggtcggctgtcagtctcagggcactcacgaagcatcatacgatgcttcgacatctcttctgtcctcctatgccgacacacatggccagaacgatgtatccactcatgtttag

SEQ ID NO: 62 - DNA, 6512 bp, Triticum aestivum
  source 1..6512: mol_type = unassigned DNA
tttgctcatttgtttggaccaaagtctcttagcgcaagaccttttgaaaacgctatagcgtgctatagcgggctatttaaaatagaggattgcacacatgcgccaatggactaatctccacaccggcccacggcaagacaaccttttcctggctaaagggataacatgtgtcctctgcatctatcgatgcacacagccttaccgtaagacaatcctgcatgcatgtgttgatcacgtcatggtgacactctaccgctgagttatatctcttcgccgtcccatacgaatcctaacgcaaaggggcgagaatatttgctgattaaataaacaattcaggaaatgttctcaagaaagaatgaaaaggaaccaaggactgactgcaagtacatcaagtatagtagataaagaataagaaatcaaatggggattcatgaaactaattgcaaagatatacatctcaattatggtgtcctctaggggagaggaaggacagtgaagcgacggccggagttctgtttgagatcaaacgtctccactctcttcacaagagcatctcctcttgaagcatacctttccttcttaatatcttttgtaataacgggcttagtcagctgttcacactttggtttcctgctcaacccagttatggcttcatttcttgtaatcgtttgtacgaccttgtttggtctgaccttctttggctttattaatttaaagccagatgtctcttgcgccttttataaaaaaaaatagcacgcatgcatcaacctccacaccatctcatgataataaaacctttttgttcttcgaagggatgtgctgaaatgatttgccgattaaatgcacacaggcttattatcgtaagacgatcttgcgtgcatgtgctgaaatgatttgccgattaaataaaaaaattcaggaaatattctcaagaaagaataaaaaggaaccaaattaaggacgaccgcaagtacatcaagtagagtatagataaataaaatgaaatcaaatggggattcgtgatgataactgcaaagatatacatctcattacatatctgcaagaaaacaagggagaaataagcatgtcgatctctgccttttggtcaaccggatctgcatcaacatattatagtgatcttgtgttgcacgaggcagctatctcaggcccagcttcgaattaattcgtaaccgcctgtccctctcatccagcagtgcaggctcgatcgtgcagtgctttctccgcattaagtacgatggatgtcctcctagtttggagatcatcgtcctttaatttcgacctcctcattaagtttgacgcacctcttcttcatcctcccttccaccagctttctcggctggcagctgcgcgccatgaactccactctgttcatcatcggcatcataggtatgcacatgcatgcttgagtctctctctctctctctctctctctctctctctctctctctctctctctctctctctctctcacgcacccacccttactttgttctttgttcattgttgtttgaccataaagcctcctttgcattttgcaggaaacatcatctcggttctggtctttgtttctcccatgtaagagcatgcgatcatgcacgcatttacagaagcatgtattttgtttctgcttattctttttttttcgaaggaggatcgacctccggattttgtttatgttgttgcttgcatgcatggctgattgctgttgttgctttacaaacatggtgcagccccacattctggaggatcgtgaggagcaggtcgacggaggacttcgaggcggcgccgtacgtcctcacgttgctcaacacattgctatggctatactacggcttcaccaagcctgacggcctgctcatcgccacagtcaatggcttcggcgctgtcatggagaccatctacatcgtcctcttccttgtctacgcggccgatcatgccaaaagggtatgtgaggccacagggtctacgaatcgcaaaaaaaaaaaggccacacggtctacaaatataacccatttttatctttagacaacaatttactcctgaatttgtatgttcccctattgatggaactataggagtagcttgcccgatcacattaaggggagtagctcgtcttgaccgagttagttgtatgtttccccattaagggaacaagaagggtggtcaagtaatttcataccctaaactatttagagcatgcttggatccaagggactatttttagtctgactaaaaatagtctcttttagaggctaaagtcccaagcacacctgactaaagagaggctaggactagtcttgaggctaaaaaaatttagtcataggaaacctactaaaatatgtattagccctctctctcctcatttaatttctctccttgaacacatgcgagttttggattggagggtttgaaggataataaatgctcaataacttgattttagtctctttagtatttggatccgagcatgggtgaggctagcaagttttagtcccactacttttagtcatgggactaaaacgtatccaaacaccctcttaattagtggctatctttagacgcaacatatctatcatattaattgtttctattgagttgcattctttccctttggacccacttatcttgtgttcctatttcagctgccttaattaatgtggttattttcgacattttcctgagttactctaagggggtgtttggttccagggactttttttgttgggactagaaaaggtccctaccaaaccaaacagggtgggacttttttgggactttttgctaaaagtccttagaagcacctccttgagagtctttttcaaaaagtcctagggactagaaaaagtcctagggctagagaaccaaacaccacctaagagtagcttcattgtcatatttcttttttggcaattttatgatatagttcgactgtgaaaatgtcataataattttactatatattatatgtatggatgatcgcatggcaagcgcaatcagccatctaaaagtgtccaatcaataatatcatgtcaacttttgcaggttaaaaccacaaagttggtggcagctttggacattggattttttggggtcgtgttcgcgaccacaacattcgccattcgtgggcttgacatgaaaatcgtggtcattggattgatatgtgcttgccttagcgtgttcatgtatgggtccccactcgctgccgtggtaaggccattacaccaagacccaacaaataaatcagtcatcatatttttcgtggctatttttatttcttttcttaatctgatgattgacacaagagagatagtgtgtgtgggtaattgcgctatgctgacattaatttttggcccatacatatataatgatttttaatagttaaatcctagcaaataactcactttgcaacaatactaagagcaaaactgttcaatttaaacgagtgttggacgcacttttctctaaatataaccaacaccctaaaacatcttctttgaagttgtatagtactccaaaagttacattattcgaatcatctttcaaatacttttggtggcatatgacctgtattttgttagtaaaatctgtgttcatacttatgctccataagactataatacagtacataatatagaacaaataatattcataaaagattgatccttatttttatccagttagatcttagttcgaggtgggaaagcactaccagatcatctctaaccatacacatacatacatacacatcgtgagacagccattcagttgggatacgtacgcaaggtttcggtcaagctatacagtttccattagctaacgctttcttgtacggcatgtgcacaccttgcgtacgtacctccagacaagagatatgctatacatatgtgtaggtcaacatctcaacatatatacacctgcatttaacaaacatagatgcagtaaatgtacacggatatgatggacatgccagtcgtcttgaaaacccatatatgtggaaacacgatatgcagaatatattcgttacattacattatacaaagcgtggatggcatgtcgaattttctatttatttttttggcggggagatctcatgtgggttgtttgattggacgcagaaccactatttttcagaggaaacagccaactaacacagtagctggctgatcgatcgatatcttcgtgatgtacttatagtatcaatatggggttataatattgtagtcctacatccttttgcttaattaagctcatagctacgtgctgatcactatctaaatcattccaaaacaagtcagagacacgttcttgcactgtcacgtgtgaatgaatgaatgcatgaggagtatacaggcctactactactgtagtcatcatgtcatgttaaattaggtgtgcgagtgggccaagatctcgattgagaaggcaggctggccggctgctgttttcgtgggcctgattgccacgccctttagttgctgctccgctaattggtttcatgttcctgaacaacgtgtgtaaatttgtggcgggaacagagaagggtgatcgcctcgaggagcgtggagtacatgcccttcttcctctccttcttcctcttcctcaacggaggcgtctgggccatgtatgccatactcgacaaagatgtcttcctcggggtaagtcttacacttattggggttaatgaaaatggaagagtgttagtgatctttaagtgggatgttaatgaaaatgcaggtcccaaatgggataggttgcttcttgggaggtatccagctggttatctacgcggtgtataggaacagtaaggtcggctgtcagtctcagggcactcacgaagcatcatacgatgcttcgacatctcttctgtcctcctatgccgacacacatggccagaacgatgtatccactcatgtttagtgatttcgaacgatgtgccgaaatattactactatagtgattgtgtaaaattatgtaatttttcgtagagtgaagtccaatttttacctctacttgatatttgtaaagctagctaggtaagttttcatctgaataccctatttaacaaaagttttgcaagtttgtatcccaattaccgaaagttttccctgtttttgtctcattaaagtttatattttaagagtggtctgctatgtgggccttagcggtttggtatatggcgtgatagatagcggttttcctccttgtatattttccccgcgcatggatcgattcgcgtccataagctaagttgtactcattccaaacacccacatgcaactatttagcggaaccaattgaacgatgcagtgcgtttgtacagctgacgaccattagaaaaaatcatgtctgactaagctattcggcttgttcgtgtgaagaacattgttgtataaaaaacgatggcatgacatgtcacgcgtacatggcaacaggacacatggttgctctcaaaacattataaaggatataactggtaaaactttccttaaatgaggtaattcggatgataccaaattagcataaaaatgtcaaagtagagggtaaaaatcagaatcactctttttctttcatatgatcatgcataaattttttgaacatctttactaatgcaacaaataatgtacataaagatgtacattgcaacatctttttaaaaaaaccagaatacttctctattccattaaccagaacaaccagctaaatcgttggtaaccagactacaagcgaagtccgggaccccatccgcccatacagttgaggacgcaagctctaggctagcaccaaatgtgctaaagaatcagctactttattacaagcccgtgggcaacgcaaaatactaaaacgagcaaaattcaaactggcaaaacatttaatctccctgaaagttgcaccatgtgcagctcggtcatgtttcttaccctgaacagctcgcaataacagcaaggaattggtttccacttggatggtgttacattgcaacatctttagtactccctccatttttatatacaaggccactatggaatatacattttgcatctatacaaggccacgaacagtaatcgaggcaaagttaatgatattttctcgtactaacaacatgtttaatacttgcatgtatgcagtcataatgacagccaactacttcctccactcagtttctttgcatgcatgcgaagtattaatgatcccagtaaacaagaaaaaaagttgacttgtaaagcagacattaaattttacattggtacttgtaatctgagtttgtggccttgtatacaaaaatggagggagtaatgttaatttaaccacattgttttttttagaattgccaatactttattgatcaatgtggatgttcatgggaatacaagagaaattagccacaagtggccaccctgatcaagcaaagaggagtatttagccacattgtttttttaggagtatttagccacattgttgcatcttgctctttgcgagcaatacacatcgcg

SEQ ID NO: 63 - protein, 269 aa, Triticum aestivum
MHLFFILPSTGFLGWQLRAMNSTLFIIGVIGNIISVLVFVSPIPTFWRIVRSRSTEDFEAAPYVLTLLNTLLWLYYGLTKPDGLLIATVNGFGAVMETIYIALFLIYAVDNAKRVKTAKLVAVLDIGFFGVVFAATTFAIGGLDMKIMVIGLICACLSVFMYGSPLTAVRTVIASRSVEYMPFFLSFFLFLNGGVWATYAILDKDVFLGVPNGIGCFLGGIQLVIYAIYRNSKVGSQSHDSDEAAYDASASLLSSEAGRHGQNDVSARV

SEQ ID NO: 64 - DNA, 810 bp, Triticum aestivum
  source 1..810: mol_type = unassigned DNA
atgcacctcttcttcatcctcccttccaccgggtttcttggctggcagctgcgcgccatgaactccactctgttcatcatcggcgtcatagggaacatcatctcggttctggtcttcgtttctcccatcccgacattctggaggattgtgaggagcaggtcgacggaggacttcgaggcggcgccatacgtcctcaccttgctcaacacactgctatggctctactatggcctcaccaagcccgatggcctgctcatcgccactgtcaacggcttcggagctgtcatggagactatctacatcgcgcttttcctcatctacgccgtcgacaatgccaaaagggttaaaactgcgaagttggtggcagttttggacatcggttttttcggggttgtgttcgcggccacaacattcgccattggagggcttgacatgaaaatcatggttattggattgatatgtgcttgccttagcgtgttcatgtacgggtccccactcactgccgtgagaacggtgatcgcctcaaggagcgtggagtacatgcccttcttcctctcattcttcctcttcctcaatggaggagtctgggccacgtatgccatactcgacaaagatgtcttccttggggtccctaatggaataggctgcttcttgggcggcatccagctggttatctatgcaatatacaggaacagtaaggtcggctctcagtctcatgacagtgacgaagcagcatatgatgcttcggcttctcttctgtcctctgaggccggcagacatggccagaatgatgtatccgcccgtgtttag

SEQ ID NO: 65 - DNA, 6171 bp, Triticum aestivum
  source 1..6171: mol_type = unassigned DNA
ggatcttggtggagatgcggcgacttgggcgaaggatctgcggtcgccccccgccttcccctcccaccagccaaacgacggggaagccctaggcaccgaaaccctaggcgcctcccagaagtggagaaggagtagatcgagatctggaatggactgaggtgggtgtggaggcggcggcgtgggatttatcccctccacaaccctaaccgcgtgccctgtagctgttgaccccacctggcccgggttcgccccacctcccggtcccgccatgccgcgtgtgtcaggcgcaggcccgagaagccctgggtccgcggtccgctgcggtacacgggacgcaccgagcggtacacgaacgcgccccacaaccatcgtctccggcgtgactgcatcagcgcatgtcgccgtcgatcggcggccatggccggcgtgaggggagggagaggggagggaggtcaggacagccatctccctgatttggtagtgagttgatactggacctccccctactgcgcgatcacctacatttgagctcacctacgtttccttcttaatatcttttgtaataatgggcttagtcagctgttcacactttggtttccagctcaatccagtcatggcttcattacttgtgatcgtttgtacgacatgtttggtcttaccttctttggttttattaattaaaagctggatgtctcttgcgtcttttatcaaaaaaaatagcacgcatacatcaacctccacgccatcgcatggtaagacaacctttttgttcttcgaaaggaggataacacggtgcctctgtatctataaatgcacacaagcttatgaccgtaagacgatcttgcgcgcatgtgctgaaatgatttgctgattaaataaacaattcaggaaatgctctcaagaaagaacaaaagggaaccagggacgaccgcaagtagatcaactacagtataaataaagaaaatgaaatcaaatggggattcatgatgataactacaaagatatacacatcattatatacctgcaagaaaacaaggcagaaataagcacgtcgatctctgccttttggtcaaccggatctgcaaggtaggccggtggcgttcgacacaacaacaacatattatactgttcttgtgttgcacgaggcagctagctcaggcccagcttcgaattaattcgtaaccgcctgtccctctcatccagcagcgcaggctccatcgtgaagtgctttctccgcattaagtacgatggatgtccttctagtttgcagatcatcgtcctttaacttcgacctcctcgttaagtttgatgcacctcttcttcatcctcccttccaccgggtttcttggctggcagctgcgcgccatgaactccactctgttcatcatcggcgtcataggtatgcgcatggatgctctcgtctctctctctctctctctctctctctctctctctatctatctctctctctctctctctctctctctctctctctcacacacacacacacacacacacacacacacacatttatctttctttgttctttctttctttgttgtttgaccatggagcttctttgggttttgcagggaacatcatctcggttctggtcttcgtttctcccatgtaagagctacgatcatgcatgcatttgcagaagcatttaattcgtttttgttttttccgtcttttctcgaggaggatcaacccccggattttgtttctggtgttgcttacatgcatggttgattgttgttagtgcttacataaatggtgcagcccgacattctggaggattgtgaggagcaggtcgacggaggacttcgaggcggcgccatacgtcctcaccttgctcaacacactgctatggctctactatggcctcaccaagcccgatggcctgctcatcgccactgtcaacggcttcggagctgtcatggagactatctacatcgcgcttttcctcatctacgccgtcgacaatgccaaaagggtacgtgaggccacacggtgcagtctacaaataaaacccatttgtatctctagacagcaatttactcctgaatttgtgcaactggaggcaagagtacattttcccattgagagaactatacgagtagctccccattaaggggagtcgtagctcgtcttgaccgagttagttatatgtttcccattaagggaacaagaatggtgctcaagtaatttcatacactaaactatttaattactggctatctttactcgcaacatatctttcatattgattgtttctgttgagtcgcattctttccctttaattcataccacttatttggtgtcctatttcagttgcgttaatgtggttattatttgaccatttctactctaaaagtacttcattatatatatttttggcaattttatgatatagttcggctctggaaacagcatacagttattactatatatttacatgtatatggaagatcatgtggcaagcgtaatcagacatctcaaatttttgaatcaatcatatcatgttgccctttacaggttaaaactgcgaagttggtggcagttttggacatcggttttttcggggttgtgttcgcggccacaacattcgccattggagggcttgacatgaaaatcatggttattggattgatatgtgcttgccttagcgtgttcatgtacgggtccccactcactgccgtggtaaggccattacaccaattggtcatctgtttgcttaactttctaggttttatgtatattttgttacggtgattttttttagaaatcttttatgcttctttttgttgtttcgacaatgtaactgacaaagagaggtctcgagatagggtgtgcgaaatagtgatacatagacaaattttttacgcccatacacgtaaatgaaaaacaattgtgataattgaatcctatcaaataactcgctttgtaagaatgctaggagtgaaacttttcaattttaaggagtatcgggcgcaatttttcctacatataacaaacatacatgaacatctgttttgaagttgtatagtactgcaaaagctataccactaaagacatctatccaatggcatatttccgtgttgtataacttatgtcttgttagtacaaaatttgtgatcaaagttacgcccacaatttgaggtggccttaattatatatattttgacggagggagggtagcaaaaagtaaaggtattgatgaccctcaataaactataatacagtacggaatatacaagaaataatatctattaaaatggcatccttgtttctatgcaattagatctttattatatgtggcaaagtactaccagatcatctttgatcatacagtacatgtatacatacacatcgtgaggcagccatttcgttgggatacgcaaggttccggtcaagttatatacagttcccactagctaacactttcttgtatggtatgtgtacaccttgcgtccagacaagagatatgctatacatatgcgttggtcaacttatacatctgcattttacaaatatatatagatctagtaaacttgcacggatatgatagacatgtaagtcgtcttgaaaaaaatatggcgtggacacacgatatgcagaatatatccgccacattacattatacaaagcatggatggcatgttgaattttgtattcctttttttgtgaggagatctcatttgagttgtttgattggacgccaaactgctattttcagaggaaacagccaactaacacactagccggctgatcgatcgatatcttggtgctgcagcgtatcgtatcattggggatatttgttaattagttggggttacaatattatattacactagtacacgtattgcttaattaagctcatagctacgtgctgatcactatctaaatcaattcagaacaagtcagaaacatgtacgttcttgcactgtcacgcgtgaatgaatgaatgaatgaatggacgaggagtatacaatactactgtactcatcatgttaattacgtgtgcgagttggctaagatcttgattgaaaaggcggactgttttcgtggccatggttattagttccacgtcgatttggatggatggagttggaacttcgtatgtgttacgttaattaatttcttgtttcaaaagaagtttaattaatttctcagaaccgtggtactgcacctgaaaatcttttgtcaatttgtggcgggaacagagaacggtgatcgcctcaaggagcgtggagtacatgcccttcttcctctcattcttcctcttcctcaatggaggagtctgggccacgtatgccatactcgacaaagatgtcttccttggggtaagataagaagcacttacttgtcttataggagtacttaatcaggttacagaaaatggcttcatgttttaatgatctttgtacttacgtgtctttacttgcatgcaggtccctaatggaataggctgcttcttgggcggcatccagctggttatctatgcaatatacaggaacagtaaggtcggctctcagtctcatgacagtgacgaagcagcatatgatgcttcggcttctcttctgtcctctgaggccggcagacatggccagaatgatgtatccgcccgtgtttagtgaatttggacgacgtgctaaaatatactgctgtagtgattgtgtaaaattatgtgatgttttgtagagtgaaatccattttttaccactctacttgatatttgtaaagctagctagctatccatttatcagttttcatcggattaccctgtttaacaaaagtttcgcaagtttgtatcccaattagcgaaagttttgtcagttttttgtcccatttaaaatttaaaatttaagagtgatcttctaggtggccctcagccgtttggtatatggcgtgacacattgcggttttccaccttgtatattttccccgtacatggatcgactcgcttccctaagctaagttgtgctcatcccaaacacccgcatgcaactgtttagcggaaccacaacgcagtgcgtatgtgcagctgacgaccgtgagaaaaaaattcatgtctgactatgctattaggcttgttcgtgtgaagaacatcgttgtatgaaaaacgatggcatgacatgtcacgcgtacataggaacaggacccatagttgctctcaaaacatttataaaggataaaactggtaaaactttccttaaatgaggtaattcggatgataccaaattaacgtaaaaatgcaaagtaaagggtaaaaattagaatcactctttttctttcgtatgatcatgcataaaaactgtgaacatctttactaatgcaaaaaataatgtacatatttctgataaagatgtactgtacattgcaacatctttactaatgttaatttagccacattgctgcatcttgctctttgtgagcaatacacgtcgcgggcctgcaatcctgtgggcctacgtcatacagtatgactcacctacgccatacagtagtactacagtaggcgggttttctatttttcttttgtgtccattttttctctataatactcgagtgcattttttttcatttctttcttttcctttttatttatgaaaaattaatttaactaagatgatttttaatctacatatgtattgtttcttccaaaaagatataaacctatttgttaaaaatgcatgaagacctttactgaaggtttactacaaaaatattcactgtatattaataatatgcccgttatgtttaggaaaactgttagtcacatattttggaaacattcatcgtgaactaaaataggttgagcctattaaaaaaaggtacattgtgtatttaaaaaacgtcatcacatattacaaaatgttcatctgtcttgaagatcactccattgtgttaaaaacagttcagtgtatactaaaaaagtgttcacctcgtactaaaaactgttgatcatgaattcaaaaaaacatttaatgtttaatccaaaaaaatgctcactttctatttagaaagattttttgtgcatttaaaaatattcatcacatttaaaaaaatgctgagtgtgtactaaaaaattcttatcattgtttcaaaaaggtttgatgtgcattttaaaatgtgcatagcatatttcagaaattctgcacgtattac

SEQ ID NO: 66 - protein, 269 aa, Triticum aestivum; identical to SEQ ID NO: 63

SEQ ID NO: 67 - DNA, 810 bp, Triticum aestivum; identical to SEQ ID NO: 64
  source 1..810: mol_type = unassigned DNA

SEQ ID NO: 68 - DNA, 6171 bp, Triticum aestivum; identical to SEQ ID NO: 65
  source 1..6171: mol_type = unassigned DNA

SEQ ID NO: 69 - protein, 402 aa, Triticum aestivum
MAVEAPQQPEQAAGGSVEQGAAAGGGRLKKGPWTPDEDQLLVEHVRRHGEGSWNAVRRETGLLRCGKSCRLRWANHLRPNLKRGPFSPEEERLILRLHALIGNKWARISAHLPGRTDNEIKNYWNTRLKRRKRAGLALYPPDVEREVALVRAGKLRPIVDADGNASSLQAPLLLDAAADQFAWPAAPPFHPAFNNVAPPQPFQFTGNISHNPQALLAAQVPYLHHDEVSAGLGHANKLYADALGMPPLVPPSAQELPSNQSPADAGGPLEMLVLEQDQRLPGAALLRVTSMPELVYNENDYSAWPSGLSGGSGSRSEGDVTSHYGGKCDCFFDGVKPAKGMPASLAVAEEEVSGLFGGEELVAVWPDKPPESITKDDFNLQMMEMQHLMPPVPLPADEHGLN

SEQ ID NO: 70 - DNA, 1209 bp, Triticum aestivum
  source 1..1209: mol_type = unassigned DNA
atggctgtggaggcgcctcagcagcctgaacaagcggcgggtggatccgtggagcagggtgcggcggcgggcggcggcaggctgaagaaggggccatggacgccggatgaggaccagctgctggtggagcacgtacggcggcacggcgaagggagctggaacgcggtgcggcgggagacggggctgctgcgctgcggcaagagttgccggctccggtgggccaaccaccttcgccccaacctcaagcggggccccttctcgccggaggaggagcgcctcatcctccgcctccacgcgctcatcggcaacaagtgggcgcgcatctccgcacacctgccggggaggacggacaatgagatcaagaactactggaacacgcggctgaagcggcggaagcgcgccggcctggccctgtacccgccggatgtcgagcgggaggtggcgctcgtccgcgccggcaagctgaggcccatcgtcgacgccgacggcaacgccagcagcctccaagcaccgctcctcctggacgcggccgcggaccagttcgcctggccggctgcgccgccgttccaccccgccttcaacaacgtcgctcctccgcagcctttccaattcaccggcaacattagccacaacccgcaggccctcctcgcagcgcaagtaccgtacctccaccacgacgaggtttccgccggcctcggccacgccaacaagctttacgccgacgcgctggggatgccaccgttggtgcccccctctgcgcaggagcttccttcgaaccaatcgcccgccgacgccggcgggccgctcgagatgctcgtcctcgagcaggaccagcggctgcccggcgccgccctgctccgcgttacgtccatgccggagctggtctacaacgagaacgactactccgcgtggccgtccggcctcagcggtggcagtggcagccgatccgaaggcgacgtgacctcgcattatggcgggaaatgcgactgcttcttcgatggcgtgaagcctgcgaaggggatgcccgcgagcttggcggtggcagaggaggaggtgtccggcctgttcggcggcgaagagttggtggccgtgtggccggacaagccgccggagtcgatcacgaaagacgacttcaacctccagatgatggagatgcagcacctcatgccccccgtgccgctcccggcagacgaacacggcttgaattaa

SEQ ID NO: 71 - DNA, 4450 bp, Triticum aestivum
  source 1..4450: mol_type = unassigned DNA
ccgccggcctacatgacgcctaaaatgttgccatgccagcagccgccacctccatgccaccgtgttgcgggaagcacacccttccatggccttcggctccggcagtccggccgcttcattgctaaaatcaactatgatcggcagcagagatggctcggcacctttaccacacccgagctttgtcgcgtgtgcttacgacgtggtggcttggaagtatcaccgactccagctcaacttcccccatattacgtcgctcgaggacgcggagttcctcatccctggactatgaatcgtgtcacgcggtgaggggaaggaagatctcctggtggtggagcagcgcaccgcccatgagtgtgatgcagtggctatggtgagattcactaaggtgaatccacacctcgtggtagtggggcgcaaattctttgccaagagggtcgtgaggcgcaagaaggaggacgaggttggccctgacaggcaatcaagattgagtccgacaacaacaaagacgatgtcgaattcggtagtgatgaatcgttgctggagctttagaactgtgtggagtccaaggatggtgaccattagtgtgtctctagtgtgcgtgtagtagtgaatctatcgtagtattgctattttcatgtttattaagtttgaacatttcgtagttcaaaatatcaaaatatgtggtgatcttgtttaaagtttggaagttaattttagggcaatttctggtgacctaaaaccttctgtcctactctactttttttacaccaacttatacatcatctgtcttcccgcaaaaaaaaaaaaacttatacatcaactgtcggagatgctcttgtgggcagcaaaaacaatagagcagtgctacacacacgatgctgtgcgcacgattcatgcacgacaacagatccctgtccgtccatgcatgtagcagagtccagcagaccgtttgatcccgcatcgttcatctgtcgtgcatactgttgtcgtccgcgcagcagttccgaaaacaatatagtgtggatgccctactagcttctagatctcttcaacacacgggaggagatggattcacagaaggcatgcagggatgcatgcgccccttcatgcatggccgcatgcatcaagcatggactggaccgattaaataggaggaccatcaatctttcgtgccattattttcgcgttctccttctctcccccattttttcctctcctcttttttggcccgccacccctactagattgacaaaaaacaaaacaaatatttccctttgttctcataatcttcttctagtagctccggcgaattctgctcctctctagtagaggatgtgctcgatcgggacgctaggtttcagtttctagattgattaggaacatatacgtacaatgcgttgagcttttgatcttccattcattcatgtttttgtcttcgatggtttctgactcctccggcccggcgatgcgtgggaggtaggcgacgagatcatccgcctctctccccctcttctcgatctcgatcgcatgtaagctttgagaagaggaagaggaggagagaggaaaggtgaggcggatcatttcaccggtccgtcgatcgatcgatggctgtggaggcgcctcagcagcctgaacaagcggcgggtggatccgtggagcagggtgcggcggcgggcggcggcaggctgaagaaggggccatggacgccggatgaggaccagctgctggtggagcacgtacggcggcacggcgaagggagctggaacgcggtgcggcgggagacggggctgctgcgctgcggcaagagttgccggctccggtgggccaaccaccttcgccccaacctcaagcggggccccttctcgccggaggaggagcgcctcatcctccgcctccacgcgctcatcggcaacaagtgggcgcgcatctccgcacacgtgagtaccaccggtcgttcgatccctttaccccgcctcgccattagaatttcttgcctgccgttgcctatcgattgcctggtgcccgatctgcgtctgcatgcagctgccggggaggacggacaatgagatcaagaactactggaacacgcggctgaagcggcggaagcgcgccggcctggccctgtacccgccggatgtcgagcgggaggtggcgctcgtccgcgccggcaagctgaggcccatcgtcgacgccgacggcaacgccagcagcctccaagcaccgctcctcctggacgcggccgcggaccagttcgcctggccggctgcgccgccgttccaccccgccttcaacaacgtcgctcctccgcagcctttccaattcaccggcaacattagccacaacccgcaggccctcctcgcagcgcaagtaccgtacctccaccacgacgaggtttccgccggcctcggccacgccaacaagctttacgccgacgcgctggggatgccaccgttggtgcccccctctgcgcaggagcttccttcgaaccaatcgcccgccgacgccggcgggccgctcgagatgctcgtcctcgagcaggaccagcggctgcccggcgccgccctgctccgcgttacgtccatgccggagctggtctacaacgagaacgactactccgcgtggccgtccggcctcagcggtggcagtggcagccgatccgaaggcgacgtgacctcgcattatggcgggaaatgcgactgcttcttcggtgagttggatcttgaccatcgtctctctcccaatccaaatatgtcacgtccgactccggtgagttaacaatgccatgcatgatgtcgtcgacacacgcgcagatggcgtgaagcctgcgaaggggatgcccgcgagcttggcggtggcagaggaggaggtgtccggcctgttcggcggcgaagagttggtggccgtgtggccggacaagccgccggagtcgatcacgaaagacgacttcaacctccagatgatggagatgcagcacctcatgccccccgtgccgctcccggcagacgaacacggcttgaattaattagcacaacgccgcttcgcaaacaaaactggaacagttcaaaagaacaagggatttaaaagaaagaaaaaatagtgtactgctgtagtaaaaactcagttaaggcccatcatgaaaatgtttgtctttgtctttatgcaacgagagatggattatgtttgtaaaaattgattcgcggaagcaagccaaggaacatggtccgtccatccataaagtgggttatttgctcgcaacggtatattttagaaccgaaaatcctacatctatgaaaagctacgtagctgctctttacgcaaactttctaacaactaaacctctccccttttaattttcagagggatgggcccgtccttccctttacctccaatcatacgagagtggcctttctactctcgggtgtgggtacacctactatcctatccattccttgtagttgtctcacctcgtgatccgaacactactcttcaatcctgttttgatttgcaggcctacatacacaataactacaagtctcactcgactgcatacctagtgtgtaggctggcaggtcacatctcgcgtctctacactcacgtgaaccatcgtctgccatccttcacatatctctatttctcctcaggccatgtctaaattctactccctccttccatctatatagggtctaatacattttttgagactaactttaatcaaatgttaaagcaataatatatgacatgcaacttttttttttgcgaaaaatatatgacatgcaacttacacaaagcataccaccaaattcgtatgtgaaagaagctttcaatgatataatttttacgttatgcatcttatgtactattaatcttgtcaaaagtcaaatgaggtctagaaaaatgcattatgccctatataaatggaacgatggagtaaaatggatgcatcatgcatgatcagtcaaatcacttctacccccaatctctctctctctcttgaaagctctctcgcatttattatcagcgctctctcttgcgcactctctctctctctcaatcagagaaataatctctcttctccatcgcttgcttctctcacagactctcattcacatatttcaataaataaaataaggcacgcatcacctctctctctctcttcaatttctcaagggaaaagtgtctttctctcgaagtctgtcatgcatgcttgctctctctctcctcaaaatccacacatttgctctcttgcgctatagttgagagtgaggtgactgctacagaacctgccctgacatatctatcgtgaacaattgtgcctatgacctacgccctgcctaggctcacttactggtttgaacgcatgcgtcctgcaaacagtctgcaatgcgtcggtccatctcgtgaatctcaaaggaattcaaaggccaagataagaggtgtgtgtacacgtgag

SEQ ID NO: 72 - protein, 399 aa, Triticum aestivum
MAVEAPQPEQAAGESVEQGAAAGGGRLKKGPWTPDEDQLLVEHVRRHGEGSWNAVRRETGLLRCGKSCRLRWANHLRPNLKRGPFSPEEERLILRLHALIGNKWARISAHLPGRTDNEIKNYWNTRLKRRKRAGMALYPPDVEREVALVRAGKLRPIVDADGNASSLQAPLLLDAAADQFAWPAAPPFHPAYNNVAPPQPFQFTGNISHNPQALLAAQVPYLHHDEVSAGLGHANKLYADAPGMPPLVPPAVQELPSNQSPADAGGPLEMLVLEQDQRLPGAALLRVTSMPELVYNENDYSAWPSGLSGGSGSRSEGDVTSHYGGKCDCFDGVKPAKRMAASLVVAEEEVSGLFGGEDLVEVWPDKPPESITKDDFNLQMEMQHLMPPVPLSADEHGLN

SEQ ID NO: 73 - DNA, 1200 bp, Triticum aestivum
  source 1..1200: mol_type = unassigned DNA
atggctgtggaggcgcctcagcctgaacaagcagcgggtgaatccgtggagcagggtgcggcggcgggcggcggcagactgaagaagggcccgtggacgccggatgaggaccagctgttggtggagcacgtacggcggcacggggaagggagctggaacgcggtgcggcgggagacggggctgctgcgctgcggcaagagttgccggctccggtgggccaaccaccttcgccccaacctcaagcgtggccccttctcgccggaggaggagcgcctcatcctccgcctccacgcgctcatcggcaacaagtgggcgcgcatctctgcacacctgccggggaggacggacaatgagatcaagaactactggaacacgcggttgaagcggcggaagcgcgccggcatggccctgtacccgccggatgtcgagcgggaggtggcgctcgtccgcgccggcaagctgaggcccatcgtcgacgccgacggcaacgccagcagcctccaagcaccgctcctcctggacgcggccgcggaccagttcgcctggccggctgcgccgccgttccaccccgcctacaacaacgtcgctcctccgcagcctttccaatttaccggcaacattagccacaacccgcaggccctcctcgcagcgcaagtaccgtacctccaccacgacgaggtttccgccggcctcggccacgccaacaagctttacgccgacgcaccggggatgccaccgttggtgccccccgctgtacaggagctcccttcgaaccaatctcccgcggacgccggcgggccgctcgagatgctcgtcctcgagcaggaccagcggctgcccggcgccgccctgctccgcgttacgtccatgccggagctggtctacaacgagaacgactactccgcgtggccgtccggcctcagcggtggcagtggcagccgatccgaaggcgacgtgacctcgcattatggcgggaaatgcgactgcttcgatggcgtgaagcctgcgaagaggatggccgcgagcttggtggtggcagaggaggaggtgtccggcctgttcggcggcgaagatttggtggaggtgtggcctgacaagccgccggagtcgatcacgaaagacgacttcaacctccagatggagatgcagcacctcatgccccccgtgccgctctcggctgacgaacacggcttgaattaa

SEQ ID NO: 74 - DNA, 4285 bp, Triticum aestivum
  misc_difference 634: note = a, c, t, g, unknown or other
  source 1..4285: mol_type = unassigned DNA
gcttcgctaagcactacgaaggaggaggagttggaggaggagagggctgcgctaggcaaggggtgcggctgccctctctctccctcactatatatagggggaaggggggtggaggaggcgccctagggttccctaggggaggggcggcggccacaggggaaaccctagatgggtttgggtgcccccaccccctaggaaacttgccccccaagctgggaggggcggctgccctaggggtggcgcccccacctctcctggttacgtgagaggggttgggaggggcgcacagccccttagtgggctgattcatgccaatccaacagacactttcggagatacctgtagtgcacctttatagccacccagttacgttgtgacgtttggtacacccaaagcattcctacggtatccgggagttggacaatctcatggtttaaggaaacgatacttgacattagaaaagctcttagcaaacgaactacacgatcttgtgctatgcttaggattgggtcttgtccatcacatcattctcctaatgatgtgatcccgttatcaatgacatccaatgtccatggtcaggaaaccataaccatctattgatcaacgagctagtcaactagaggcttactagggngtggtctatgtattcacacatgtattacggtttccagttaatacaattatagcatgaacaatagacaattatcatgaacaaggaaatacaataataaccattttattattgcctctagggaatatttcaacaggcagcaggcagccaaacatcggatacgcccatgtatgtgatatgtgaccgtatttgcacgtccgcacaagttcgatgatcagaatcacgtattttacaagtttatgcaccaaactgatggtcgcgtgcaagtttaaagactccaagtgtatttacctctaaacttatacatcaactgtcggagatgctcttctgggcagcaaaaacaatatagtgtggatgctctactagcttctagatctcttcaacacacgggggaagatggattcacagaaggcatgcagggatgcatgcgccccttcatgcatggccgcatgcatcatgcatggactggaccgattcaataggaggaccatcaatctttcctgccattattttcgcgttctccttctttccccatttttcctctcctctttttggtccgccacccctactagattgacaaaaaacaaaacaaatatttccctttattctcataatctttttctggtagctccggcgagttctgctcctctctagtagaggatgtgctcgggatgctaggtttcagtttctagattgattaggaacatatacgtacaatgcattgagcttttgatcttccattcattcatgtttttgtcttcgatggtttctgactcctccggcccggcgatgcgtgggaggtaggcgacgagatcatccgcctctctccccctcttctcgatctcgatcgcatgtaagctttgagaagaggaagaggaggagagaggagaggtgaggcggatcatttcaccggttcgtcgatcgatcgatggctgtggaggcgcctcagcctgaacaagcagcgggtgaatccgtggagcagggtgcggcggcgggcggcggcagactgaagaagggcccgtggacgccggatgaggaccagctgttggtggagcacgtacggcggcacggggaagggagctggaacgcggtgcggcgggagacggggctgctgcgctgcggcaagagttgccggctccggtgggccaaccaccttcgccccaacctcaagcgtggccccttctcgccggaggaggagcgcctcatcctccgcctccacgcgctcatcggcaacaagtgggcgcgcatctctgcacacgtgagtaccaccggtcattcgatccctttaccccgcctcgccattagaatttcttgcctaccattgcattcgactctatcgattgcctggtgctcgatctgcgtctgcatgcagctgccggggaggacggacaatgagatcaagaactactggaacacgcggttgaagcggcggaagcgcgccggcatggccctgtacccgccggatgtcgagcgggaggtggcgctcgtccgcgccggcaagctgaggcccatcgtcgacgccgacggcaacgccagcagcctccaagcaccgctcctcctggacgcggccgcggaccagttcgcctggccggctgcgccgccgttccaccccgcctacaacaacgtcgctcctccgcagcctttccaatttaccggcaacattagccacaacccgcaggccctcctcgcagcgcaagtaccgtacctccaccacgacgaggtttccgccggcctcggccacgccaacaagctttacgccgacgcaccggggatgccaccgttggtgccccccgctgtacaggagctcccttcgaaccaatctcccgcggacgccggcgggccgctcgagatgctcgtcctcgagcaggaccagcggctgcccggcgccgccctgctccgcgttacgtccatgccggagctggtctacaacgagaacgactactccgcgtggccgtccggcctcagcggtggcagtggcagccgatccgaaggcgacgtgacctcgcattatggcgggaaatgcgactgcttcggtgagttggatcttgaccatcgtctctctctcaatccaaatacgtcacgtccgactccggtgagttaacaatgccatgcatgataaatgtcgtcgacacacgcgcagatggcgtgaagcctgcgaagaggatggccgcgagcttggtggtggcagaggaggaggtgtccggcctgttcggcggcgaagatttggtggaggtgtggcctgacaagccgccggagtcgatcacgaaagacgacttcaacctccagatggagatgcagcacctcatgccccccgtgccgctctcggctgacgaacacggcttgaattaattagcacaacgccgcttcgcgaacaaaactggaacagttcaaaaggacaagggatttaaaagaaaaaaaaatagtgtactactgtagtaaaaaaatcagttaaggcccatcatgaaaatgtttgtctttgtctttatgcaacaagagatggattatgtttgtaaaaattgattcgcggaagcaagccaaggaacatggtccatccatccacaaagtgggttatttgctcgcgacagtatattttagaaccgaaaatctacatctatgaagagctacgtagctctttatgtaagcttcctaacaactaaacctctccccccttgatttttagaggggtgggccgtccttcccctcacctccaatcatatttatccacctagtttgttacgttaattacgtagaacaaccgcacgtcaagtcaatttattaaatctcaaacgatattatatccgattgtacatgatcatccgaagtgtcatggatcacatcaaaatgggtagaattaggttctaggttgagtatggccctcacacaatgatgaacaaatgcattagcaccctcctaattgaactgaaacttaaaaccctcaaagagcgagtgagcaatccatgttgccacaacccaacacaaattccccaatcaattcatccaccatcgtagcttttcaatatgcaggagctcttctccatataagaggaatatgtacggggatattgggtctccctggcgaatgcctatggatggccgaaaagatgataataattcaccattaacctttccctggaagcttagtgaagagacaacctcatcactaatgaccatttatcttcaaattttagttgttatatgattccttgtagatagacctactcaatatgatcatatgccttgtcattatttttcttgggagagggggggggggggttcatcatgtcaattttcactacacactagtcttacttgcctttatcgctccacacagagtgaatacatccatatgtcatcaaaacattctctgtaataggcttccatggtgttgggaaacgttgcatggaaaacaaaaaaatttctacgcgcacgcaatgatctatccatggagatgcatagcaacgagggggagagtgtgtctacgtaccctcgtagatcgaaagcggaagcgtttcccaacgcgattgatgtagtcgaactttcttcgcgctccaccgatcaagtaccgaacgtacgacacctccgagttctgcacacgttcagctcggtgacgtccctcgccttcatgatccagcaagatgtcgaggttgtagatga

SEQ ID NO: 75 - protein, 602 aa, Triticum aestivum
MAPPGLHGLPVALVIAAAVLGSFCLRLAASQQQGEEAAGEEAERQRYNFRFVRHARDAPLVSHYNYIVVGGGTAGCPLAATLSERSRVLLLERGGYPYGNRNVSSEYHFADALADTSPWSPAQRFVSEDGVVNARARVLGGGSCLNAGFYTRASSEYVRAAGWDARLVNASYRWVERELVFRPEVPRWQSALREGLLQTGVTPDNGYTFDHVPGTKIGGTIFDSAGRRHTAADFLRSANPRRLTVFLHATVSQILFRRREGSASPVAYGVVFTDPMGVQHRVYLRGVGRSEVILSAGTLGSPQLLMLSGVGPRAHLERHGVRAVVDRPMVGQGVADNPMNSVFVPSPVPVALSLVQVVGVTRFGSFIEGVSGSQFGIPLHSRRRAHSFGMFSPMTGQLGTLPPRERTAEAMRRAAEVMQGLDRRAFRGGFILEKILGPLSTGHVELRSTDPHANPAVTFNYFRDPRDVERCVRGIQTIERVVRSRAFARFTYANATAMDAAFDRAALAKFLNLLPRHPRDTRPLQQYCRDTVMTIWHYHGGCHVGPVVDQDYRVIGVAGLRVVDSSTFKYSPGTNPQATVMMLGRYMGLRIQEEGWRPGPRN

SEQ ID NO: 76 - DNA, 1809 bp, Triticum aestivum
  source 1..1809: mol_type = unassigned DNA
atggcgccgcctggccttcacggcttacccgtggcgcttgtcatcgccgccgcggttcttggctcgttctgcctcagactcgccgcctcacagcagcagggagaggaagctgcgggggaggaggcggagaggcagaggtacaacttccggttcgtgcggcacgcgcgggacgcgccgctcgtgtcccactacaactacatcgtggtcggcggcggcacggccgggtgcccgctggcggcgacgctgtcggagcgctcgcgcgtgctcctcctggagcgcggtggctacccgtacggcaaccgcaacgtgtcgagcgagtaccacttcgcggacgcgctggcggacacgtcgccgtggtcgccggcgcagcggttcgtgtcggaggacggcgtggtgaacgcccgcgcgcgcgtgcttggcggcgggagctgcctcaacgccgggttctacacgcgcgccagcagcgagtacgtgcgcgccgccgggtgggacgcgcgcctggtgaacgcgtcgtatcggtgggtggagcgcgagctggtgttccgcccggaggtgccgcggtggcagtccgcgctccgggagggcctcctccagaccggcgtcaccccggacaacggctacaccttcgaccacgtccccggcaccaagatcggcggcaccatcttcgacagcgccggccgccgccacaccgccgccgacttcctccgcagcgccaacccgcgacgcctcaccgtgttcctgcacgccaccgtgtcgcagatcctcttccggcgcagagaggggtcggcgagcccggtggcgtacggcgtggtgttcacggacccgatgggggtgcagcaccgcgtgtacctgcggggcgtggggagaagcgaggtgatcctgtcggcggggacgctggggagcccgcagctgctgatgctgagcggcgtcggcccgcgcgcgcacctggagaggcacggcgtccgcgccgtcgtggaccgccccatggtcgggcagggcgtggccgacaaccccatgaactcggtgttcgtcccgtcccccgtccccgtggcgctctccctggtccaggtcgtcggcgtcacccgcttcggcagcttcatcgagggcgtcagcggctcccagttcggcatccccctccactcccgccgccgcgcccactccttcggcatgttctcccccatgacggggcagctggggacgctgccgccgagggagaggacggcggaggcgatgcggcgggcggcggaggtgatgcaggggctggaccggcgggcgttccggggcggcttcatcctggagaagatcctggggccgctgtcgacggggcacgtggagctgcggtcgacggacccgcacgcgaacccggcggtgaccttcaactacttccgggaccccagggacgtggagcggtgcgtgcgcgggatccagaccatcgagcgggtggtgcggtcgcgggcattcgcccgcttcacctacgccaacgcgaccgccatggacgccgccttcgaccgcgccgcgctggccaagttcctcaacctgctgccccggcacccccgggacacccgcccgctgcagcagtactgccgggacaccgtgatgaccatctggcactaccacggcggctgccacgtcgggcccgtcgtcgaccaggactaccgcgtcatcggcgtcgccggcctccgcgtcgtcgacagctccaccttcaagtactcccccggcaccaacccgcaggccaccgtcatgatgctcggcaggtacatggggctcaggattcaggaggagggatggagaccaggacccagaaattaa

SEQ ID NO: 77 - DNA, 4980 bp, Triticum aestivum
  source 1..4980: mol_type = unassigned DNA
cacaccttactccatgtgctagtaaacgttttggtaaatatagtaacgtaattaatttgcttaccgggtgatgggacagcacccgctttgctaaatcaaacatttttctccacatgctagtaaaactcttgctagatatagtaatataatcaagatggttaccatatgctcagatgcaagcaaaggcccgccgattccctagatcaggccatctcttcgctttattgtatgcatgctagtaaaaaaaattaggcagtaatcaatcaacaagaaagtaccacttctagtaaatgtcctggtcacttatttgttaggtaaatttaattgtaaaaaatagtttcattcatcatacagtaagtagtagtagtagtaatatgatgttgattgattagtaaaatttattcaaattttaccatcttttctaatcaaatagtaaagtacaaattataattatgcatggtaatgggattacccttgttctgttggtggatgcatgggcgacgtggggtttgttacattgggatggcagtaatactagtaatgcgttactcattgattagtaaaatatatccaacttttaccatctttcctaatcaaatagtaaagacacgccataattatggtaatgggattaccctcgttctattgcatggatggatgggcgacgttggtattgttacattgggatgcggggccgcgcacgtccaagcggtccgatggtgctgtagtgtggccggagcgcataattaggtaatctacgcgtagccacactttagcagtcctatatatatatatatatatatatgtatatatatatatatatatatatatatatatatatatatttaaaaacatgaggatttcttggtttggactgacaaagtaatgtcactcgattattaacaacttgactacaatattttactgctggtaaggattgcacctggagatgccctaagggcaaagaccaagcaggagcaaaggtacgtccagatttgaagccttgaaggttacgtccactgaatctcttctccatcacacgactaacactcactcgccactaaaaaatggctaattactttagcctgcaaatgcaaaggatcccgacgacggcgctgttctttctatcatcactcgtccggatccttcggagctcatctttgcactagctaggaatcaatcagcaccgcatctgcacccctaaattggcaactactctttatctaatcgaattcgattcacgatccccatccatctatataaacaaaaccagaggttaaccagcaatggcgaagctagattactctgacgaatttcatggcgccgcctggccttcacggcttacccgtggcgcttgtcatcgccgccgcggttcttggctcgttctgcctcagactcgccgcctcacagcagcagggagaggaagctgcgggggaggaggcggagaggcagaggtacaacttccggttcgtgcggcacgcgcgggacgcgccgctcgtgtcccactacaactacatcgtggtcggcggcggcacggccgggtgcccgctggcggcgacgctgtcggagcgctcgcgcgtgctcctcctggagcgcggtggctacccgtacggcaaccgcaacgtgtcgagcgagtaccacttcgcggacgcgctggcggacacgtcgccgtggtcgccggcgcagcggttcgtgtcggaggacggcgtggtgaacgcccgcgcgcgcgtgcttggcggcgggagctgcctcaacgccgggttctacacgcgcgccagcagcgagtacgtgcgcgccgccgggtgggacgcgcgcctggtgaacgcgtcgtatcggtgggtggagcgcgagctggtgttccgcccggaggtgccgcggtggcagtccgcgctccgggagggcctcctccagaccggcgtcaccccggacaacggctacaccttcgaccacgtccccggcaccaagatcggcggcaccatcttcgacagcgccggccgccgccacaccgccgccgacttcctccgcagcgccaacccgcgacgcctcaccgtgttcctgcacgccaccgtgtcgcagatcctcttccggcgcagaggtacgtacatgcagcgcacgccatgccatgcatgtacatgcaagtcgtggtcgatcggtctgaattgaaatgtatgcgtgcgtgtgccggaatgctgcagaggggtcggcgagcccggtggcgtacggcgtggtgttcacggacccgatgggggtgcagcaccgcgtgtacctgcggggcgtggggagaagcgaggtgatcctgtcggcggggacgctggggagcccgcagctgctgatgctgagcggcgtcggcccgcgcgcgcacctggagaggcacggcgtccgcgccgtcgtggaccgccccatggtcgggcagggcgtggccgacaaccccatgaactcggtgttcgtcccgtcccccgtccccgtggcgctctccctggtccaggtcgtcggcgtcacccgcttcggcagcttcatcgagggcgtcagcggctcccagttcggcatccccctccactcccgccgccgcgcccactccttcggcatgttctcccccatggtatggccgacaccttctccaaactaactccaaacgtgacaatggcaatgccatcgatgcctcgacggtgcccttgattaacaacgactcatcgattcattgatcaccaccagacggggcagctggggacgctgccgccgagggagaggacggcggaggcgatgcggcgggcggcggaggtgatgcaggggctggaccggcgggcgttccggggcggcttcatcctggagaagatcctggggccgctgtcgacggggcacgtggagctgcggtcgacggacccgcacgcgaacccggcggtgaccttcaactacttccgggaccccagggacgtggagcggtgcgtgcgcgggatccagaccatcgagcgggtggtgcggtcgcgggcattcgcccgcttcacctacgccaacgcgaccgccatggacgccgccttcgaccgcgccgcgctggccaagttcctcaacctgctgccccggcacccccgggacacccgcccgctgcagcagtactgccgggacaccgtgatgaccatctggcactaccacggcggctgccacgtcgggcccgtcgtcgaccaggactaccgcgtcatcggcgtcgccggcctccgcgtcgtcgacagctccaccttcaagtactcccccggcaccaacccgcaggccaccgtcatgatgctcggcaggtcagaccaacatacgaattctttctgcttcaactcttcttcttctcctgcactcgatttgctccgacgaaatttgtcaaatgtttcttgatcatttgcctgtctttggatgatcaaactcggtcgaacaggtacatggggctcaggattcaggaggagggatggagaccaggacccagaaattaagcatgtgcattcgatccgttcattcatttcattcacggcggtgtcacccacccagcctccaaccgtaccttcatgcttccttcgtgccgcgcgggctgcttgggagattgcatgggatttcttgtttctttcttccagagattgttttgtgaacagctggttgttagtggttacatacacatttgttgttgtttgttacatgtattattgtaacgcttgtgagataaaatcacacaacgtttgtgagatcaaacactttgcggagatcatttgtgagatgaaacactttgcgttcatcctttttatttatacggccacttcgcatcaacgttccgccatcgctcgcaccggatctcgcggacgttgcgcatggactattacatcgcccgctgctcacctaggaagcccggagatttgcccctccacgaggcggtgctcgtcaacgagctggaggttgtagcgccgctcctcctacacccgccgaaacaccgactgctctcccaccatgacggcgttggagtgcggttacgccggtgggtgcgctgactcatcgccggatgccacctctattgtctggtcctcgccgcgccgctgacatctggcgagctagtcggcaagccaatctcagcccatcacgcacgacaggcttgtcagccggtcgtagtgacggataactcctgcttctgcttcgtcgataggctttcccacatagctccagagctcacggtcatggctgacgtggtgcagtggtgtgcctgaagaggagacaacatttaaatagcggacaccggccaggacactcgatgtggtgagttaatgtgggcgtcaacgaaggtttcacagccgccgcgctagtttaatgtcgccgggccgatggataggaaccggttagaatgcggagcaaagccgtccagccctgtccggtcacgtgtctccgacattggaacagggtggagaccaggaggcgctcttggccggcgcgccgcttcaatgtcggctatagagagaggtcacttccgctctgggccagcattaatgcgaagctagcgctttggagcgatgttggcctgcattaatatgcggcaagtgctttgcgtgggaaatggcgcgggcatggggtagtttatttggtgggtcagggttggtggacgcgtacgtggcagcggtccggatgcccgcaaagaccacctagtctgcatctggtttactgatatgtctccaacatatttacaatttatgaagtattcatgctatattaacatcaatcatatatagttttagtgcacttttatattatttttctagactaacttattaatctactgctcagtgtgagttgttgttttcactagtagaaaaagggtcaaatgtgaagcacattattgccggtttgaatttgagccggcactaatgtgatcattagtgccggttccaacggctaggcgggcaggcatcattagtaccggttcataggcaacctttagcaccggttcatgccacgaaccggtac

SEQ ID NO: 78 - protein, 603 aa, Triticum aestivum
MAAPGLHGLPVVLVVVATVLGSFWIRLAASQQQGEEAAGEEAERQRYNFRFVRHARDAPLVSHYNYIVVGGGTAGCPLAATLSERSRVLLLERGGYPYGNRNVSSEYHFADALADTSPRSPAQRFVSEDGVVNARARVLGGGSCLNAGFYTRASSEYVRAAGWDARLVNASYRWVERELVFRPDVPRWQCALREGLLQAGVTPDNGYTVDHVPGTKIGGTIFDSAGRRHTAADFLRSANPRRLTVFLHATVSQILFRRREGSASPVAYGVVFTDPMGVQHRVYLRGVGRSEVILAAGTLGSPQLLMLSGVGPRAHLEKHGVRAVVDRPMVGQGVADNPMNSVFVPSPVPVALSLVQVVGVTRFGSFIEGVSGSQFGIPLHSRRRGHSFGMFSPMTGQLGTLPPRERTPEAMRRAAEVMQGLDRRAFRGGFILEKILGPLSTGHVELRSTDPHANPAVTFNYFRDPRDVERCVGGIQTIERVVRSRAFSRFTYANASAMDAAFDCAALAKFLNLLPRHPRDTRPLQQYCRDTVMTIWHYHGGCHVGPVVDPDYRVIGVAGLRVVDSSTFKYSPGTNPQATVMMLGRYMGLKIQEEGWRPGRPRD

SEQ ID NO: 79 - DNA, 1812 bp, Triticum aestivum
  source 1..1812: mol_type = unassigned DNA
atggcggcgcctggccttcacggcttaccggtggtgctagtcgtcgtcgcgacggttcttggctcattttggatcagactcgccgcctcgcagcagcagggagaggaagctgccggcgaggaggcggagaggcagaggtacaacttcaggttcgtgcggcacgcgcgggacgcgccgctggtgtcccactacaactacatcgtggtcggcggcggcacggcgggctgcccgctggcggcgacgctgtcggagcgctcgcgcgtgctcctcctcgagcgcggcggctacccgtacggcaaccgcaacgtgtccagcgagtaccacttcgcggacgcgctggcggacacgtcgccccggtcgccggcgcagcggttcgtgtcggaggacggcgtcgtcaacgcccgcgcgcgcgtgctcggcggcgggagctgcctcaacgccggcttctacacgcgcgccagcagcgagtacgtgcgcgccgccgggtgggacgcgcgcctggtgaacgcgtcgtaccggtgggtggagcgcgagctggtgttccgcccggacgtgccgcgctggcagtgcgcgctccgcgagggcctcctccaggccggcgtcaccccggacaacggctacaccgtcgaccacgtccccggcaccaagatcggtggcaccatcttcgacagcgccggccgccgccacaccgccgccgacttcctccgcagcgccaaccccaggcgcctcaccgtgttcctgcacgccaccgtgtcgcagatcctcttccggcgcagagaggggtcggcgagcccggtggcgtacggggtggtgttcacggacccgatgggggtgcagcaccgcgtgtacctgcggggcgtggggaggagcgaggtgatcctggcggcagggacgctggggagcccgcagctgctgatgctgagcggcgtcggcccgcgcgcgcacctggagaaacacggcgtccgcgccgtggtggaccgccccatggtcgggcagggcgtggccgacaaccccatgaactcggtgttcgtcccgtcccccgtccccgtcgcgctctccctggtccaggtcgtcggcgtcacccgcttcggcagcttcatcgagggcgtcagcggctcccagttcggcatccccctccactcccgccgccgcggccactccttcggcatgttctcccccatgacggggcagctggggacgctgccgccgagggagaggacgccggaggcgatgaggcgggcggcggaggtgatgcaggggctggaccggcgggcgttccggggcggcttcatcctggagaagatcctggggccgctctcgacggggcacgtggagctgcggtcgacggacccgcacgccaacccggcggtgaccttcaactacttccgggacccgagggacgtggagcggtgcgtgggcgggatccagaccatcgagcgggtggtgcggtcgcgggccttctcccgcttcacctacgcgaacgcgagcgccatggacgccgccttcgactgcgccgcgctggccaagttcctcaacctgctgccccggcacccccgggacacgcgcccgctgcagcagtactgccgggacaccgtcatgaccatctggcactaccacggcggctgccacgtcgggcccgtcgtcgacccggactaccgcgtcatcggcgtcgccggcctccgcgtcgtcgacagctccaccttcaagtactcccccggcaccaacccgcaggccaccgtcatgatgctcggcaggtacatggggctcaagattcaggaggaggggtggagaccaggacgacccagagattaa

SEQ ID NO: 80 - DNA, 4989 bp, Triticum aestivum
  source 1..4989: mol_type = unassigned DNA
atcgccctttgatcttcgcccttcgatctctagcggcttcgtggggaggacggatcaggagggggatgtggccatgggtgactggtcggcggcgcctccggtcagatctgatctggccaatgccgctggcggtggtggccatctcttccgtcagaggtggtcggcccgaggctggatggtcagatctcgagatacgccatctagtttcggctgcgagtcgagaagacatagttgccggtgtaaaccaagacgattgcaggcgatggcggtgttctgtgtcgttaccttgatgaaggcatcgtcgtgtaattactgtcgacccactcgtgctgctccgggggaaaccctagaatctggtcttccagatcggacgatgatggtactgcagtgttgttttctctcttgggagcatcatttgtggagcaaagctggaatacagaggcaggaggtggagcggcttcgtattgcacggagctttcggtggagatgtcaagtcatgcttggccgataggtgctacgctgtgtcatgcctggtcggcaggtgctacgcacaacagatcttccagaatcttcgcgtctggacggacgagcgcgtggtggtggcaccgtggtggcattgacggatggacggactggcaaggattatgcagatctctctcttgaagatgggtcagcggttcgatgatgatggcgccgtctaaaacgtgtgcatgtggtgtatgcttttggtctgctgcaccggctgtgggtttcgatacgttatgtggatggtcggcgatggcaccggttttagatatggggagtgagaacactccactatcaacttatgtaggtgtgactggtggcttcgggtggctgtgagtatgttcttgttagagctatgttgaataataaataaagatggctgtatgcatcgattgacgcggagttcttaaccttctgttaaaaaaaacagacgacaacactcgctcgccattaaaaaaaggctaattactttagcctgcatgcaaaggatccccatgacgcctctgttctttctatcatcgctcgtccggatccctcggagctcatctttgcactagctaggaatcaatcagcccgcatctgcacccctaattggcaactactctttatctaatcgaactcgaatcacgatccccgtctatctatataaacagaaccagaggtttaccagcaatggcgaagctagattaccctgacgaaattcatggcggcgcctggccttcacggcttaccggtggtgctagtcgtcgtcgcgacggttcttggctcattttggatcagactcgccgcctcgcagcagcagggagaggaagctgccggcgaggaggcggagaggcagaggtacaacttcaggttcgtgcggcacgcgcgggacgcgccgctggtgtcccactacaactacatcgtggtcggcggcggcacggcgggctgcccgctggcggcgacgctgtcggagcgctcgcgcgtgctcctcctcgagcgcggcggctacccgtacggcaaccgcaacgtgtccagcgagtaccacttcgcggacgcgctggcggacacgtcgccccggtcgccggcgcagcggttcgtgtcggaggacggcgtcgtcaacgcccgcgcgcgcgtgctcggcggcgggagctgcctcaacgccggcttctacacgcgcgccagcagcgagtacgtgcgcgccgccgggtgggacgcgcgcctggtgaacgcgtcgtaccggtgggtggagcgcgagctggtgttccgcccggacgtgccgcgctggcagtgcgcgctccgcgagggcctcctccaggccggcgtcaccccggacaacggctacaccgtcgaccacgtccccggcaccaagatcggtggcaccatcttcgacagcgccggccgccgccacaccgccgccgacttcctccgcagcgccaaccccaggcgcctcaccgtgttcctgcacgccaccgtgtcgcagatcctcttccggcgcagaggtgcgcacatgcagtgcacgctatgccccatgcatgtacgtatgcaagtcgatattggtctgagccacatttaaatgcagaggggtcggcgagcccggtggcgtacggggtggtgttcacggacccgatgggggtgcagcaccgcgtgtacctgcggggcgtggggaggagcgaggtgatcctggcggcagggacgctggggagcccgcagctgctgatgctgagcggcgtcggcccgcgcgcgcacctggagaaacacggcgtccgcgccgtggtggaccgccccatggtcgggcagggcgtggccgacaaccccatgaactcggtgttcgtcccgtcccccgtccccgtcgcgctctccctggtccaggtcgtcggcgtcacccgcttcggcagcttcatcgagggcgtcagcggctcccagttcggcatccccctccactcccgccgccgcggccactccttcggcatgttctcccccatggtattgactattgaccgacaccttctccatactaactccaaacgtggcaatggcaatgccatcgatgcctcgacggtgcccttaattaactagtacgtgtgcgtgaatgaccgataacagacggggcagctggggacgctgccgccgagggagaggacgccggaggcgatgaggcgggcggcggaggtgatgcaggggctggaccggcgggcgttccggggcggcttcatcctggagaagatcctggggccgctctcgacggggcacgtggagctgcggtcgacggacccgcacgccaacccggcggtgaccttcaactacttccgggacccgagggacgtggagcggtgcgtgggcgggatccagaccatcgagcgggtggtgcggtcgcgggccttctcccgcttcacctacgcgaacgcgagcgccatggacgccgccttcgactgcgccgcgctggccaagttcctcaacctgctgccccggcacccccgggacacgcgcccgctgcagcagtactgccgggacaccgtcatgaccatctggcactaccacggcggctgccacgtcgggcccgtcgtcgacccggactaccgcgtcatcggcgtcgccggcctccgcgtcgtcgacagctccaccttcaagtactcccccggcaccaacccgcaggccaccgtcatgatgctcggcaggtcggacttgtgcttcaactcttcttctcctgcatccgatttactcccacgaaattcaaatatgtgtgtcgacgtacgtttcctggtcattttttgcatgtgtttggatgatgaaactgggtccaacaggtacatggggctcaagattcaggaggaggggtggagaccaggacgacccagagattaagcatatgcactccatccgttgatccattcattcatgcttccttcgtgccgtggtgggtggaccctgcggcttgggagatgcatgggatttcttgtttatttcttctagggattgttttgtggactggttacatacacattgttgtttgttacatgtaatgtaagcgtttgctgagataaaattgcacgttcgacgcaacatttgtgagatcaaacactttgcatccatcgtttgtgcgatgaaaacactttgcattgatcctttttatagggcaactgtgcatcgatcgttattaactccaaaaaggaaaatattgtacctcgaaacacacaaggtgcatcaaatttgaaattcacaaacgttattatctcctcgtgccctagttgtggtgatgctttattccgagagttcacttcatttcaagagttcacacttcacaaacgttattatctccccatgccctagttgtggcgatgctttattccatgagttcacttccttccaagagttcacacttcacaaacgttattatgtccccgtgccctagttgtggcaatgctttattccatgagttcacttccttccgagagttcaaaacttcacaaacattattatctccccgtgccttattgtggcgatgctttaccgggctacgcctcggaactagatctatggtttctctgcatgttcggtgcaattgttcttgcgggttgagaatatttgtccttgcaggaccggccttttcgatctgtttagtttttgtcagtgtgtcttagtgcttttgttagtttgattttttgttgaactagaatctttccttggctctacagtgaagaccttgtggttcgacaatttgcacttctaggggatcatcccgtcccaagttcattcacagttgaaggcttcccatattaataggtgggcgactaaaggggctctctaaaacctctaccggtgtagtgcctttcttgatgccttggtagaattccgccttccaaaatttattaccatatagaaggtgtatgtgagaggctttattgaaattcttagttttggaagttactttctaatttttgggatctttgatccaagcattgtgtgtgtacattcataagggtgagtgtatgcgcgtgtatatgagcgcttgcgtctatactgtgttcaaaacaaagttggcacgtttgaaaaaaagttatagatatctttaaaaaaaagggaagtgagcctacccaaaaagagagcctatgtgggcttgataaaggtgagatattacacacacacacacacaatttcttgcccacgaggctatttcataaagagctcctattggatgcccgcatgcgtccaatagtcgagctttcgctgaagaggcgtgcaaacgggtcggcccattcgcagacgtctagcaaatttatatttcacgaaaaataaaataatacatgtggggagtcgaattgccgacctcacactggtcagcagcgtcacttaccagtcgagatggcgactaaggtgtcgtaaaacgcagcgctaaagttaaagtacatttttttaaagattatcaatgtttctttgaaaacatgcgaccattttttcttagataatacgaataatgtatgaaaa

SEQ ID NO: 81 - protein, 606 aa, Triticum aestivum
MAAPGLRGSSVALLLAATVLGSFYLRLAVSQQQGQGEEAAGEEEEAQRQRYNFRFVRHARDAPLVSHYNYIVVGGGTAGCPLAATLSERSRVLLLERGGYPYGNRNVSSEYHFADALADTSPRSPAQRFVSEDGVVNARARVLGGGSCLNAGFYTRASSEYVRAAGWDARLVNASYRWVERELVFRPEVPRWQGALREGLLQAGVTPDNGYTVDHVPGTKIGGTIFDSAGRRHTAADFLRSANPRRLTVFLHATVSQILFRRREGSASPVAYGVVFTDTMGVQHRVYLRGVGRSEVILAAGTLGSPQLLMLSGVGPRAHLEKHGVRAVVDRPMVGQGVADNPMNSVFVPSPVPVALSLVQVVGVTRFGSFIEGVSGSQFGIPLHSRRRAHSFGMFSPMTGQLGTLPPRERTAGAMRRAAEVMQGLDRRAFRGGFILEKILGPLSTGHVELRSTDPHANPAVTFNYFRDPRDVERCVRGIQTIERVVRSRAFSRFTYANATAMDAAFDRAALAKFLNLLPRHPRDTRPLQQYCRDTVMTIWHYHGGCHVGPVVDPDYRVIGVAGLRVVDSSTFKYSPGTNPQATVMMLGRYMGLKIQEEGWRPGPRN

SEQ ID NO: 82 - DNA, 1821 bp, Triticum aestivum
  source 1..1821: mol_type = unassigned DNA
atggcggcgcctggtcttcggggctcatccgtggcgctactcctcgccgcgacggttcttggctcattttacctcagactcgccgtctcgcagcagcagggccagggagaggaagctgcaggcgaggaggaggaggcgcagcggcagaggtacaacttccggttcgtgcggcacgcgcgggacgcgccgctggtgtcccactacaactacatcgtggtcggcggcggcacggcgggctgcccgctggcggccacgctgtcggagcgctcgcgcgtgctcctcctggagcgcggcggctacccgtacggcaaccgcaacgtgtccagcgagtaccacttcgcggacgcgctggcggacacgtcgccgcggtcgccggcgcagcggttcgtgtcggaggacggcgtcgtcaacgcccgcgcgcgcgtgctgggcggcgggagctgcctcaacgccggcttctacacgcgcgccagcagcgagtacgtgcgcgccgccgggtgggacgcgcgcctggtgaacgcgtcgtaccggtgggtggagcgcgagctggtgttccgcccggaggtgccgcgatggcagggcgcgctccgcgagggcctcctccaggccggcgtcaccccggacaacggctacaccgtcgaccacgtccccggcaccaagatcggcggcaccatcttcgacagcgccggccgccgccacaccgccgccgacttcctccgcagcgccaaccccaggcgcctcaccgtgttcctgcacgccaccgtgtcgcagatcctcttccggcgcagagaggggtcggcgagccccgtggcgtacggcgtggtgttcacggacacgatgggggtgcagcaccgcgtgtacctgcggggcgtggggaggagcgaggtgatcctggcggcggggacgctggggagcccgcagctgctgatgctgagcggcgtcggcccgcgcgcgcacctggagaagcacggcgtccgcgccgtcgtggaccgccccatggtcgggcagggcgtggccgacaaccccatgaactcggtgttcgtcccgtcccccgtccccgtcgcgctctcgctggtccaggtcgtcggcgtcacccgcttcggcagcttcatcgagggcgtcagcggctcccagttcggcatccccctccactcccgccgccgcgcccactcctttggcatgttctcccccatgacggggcagctcgggacgctgccgccgagggagaggacggcgggggcgatgcggcgggcggcggaggtgatgcaggggctggaccggcgggcgttccggggcggcttcatcctggagaagatcctagggccgctctccacggggcacgtggagctgcggtcgacggacccgcacgcgaacccggcggtgaccttcaactacttccgggaccccagggacgtggagcggtgcgtgcgcgggatccagaccatcgagcgggtggtgcgctcgcgggccttctcccgcttcacctacgccaacgcgaccgccatggacgccgccttcgaccgcgccgcgctggccaagttcctcaacttgctgccccggcacccccgggacacgcgcccgctgcagcagtactgccgggacacggtgatgaccatctggcactaccacggcggctgccacgtcgggcccgtcgtcgacccggactaccgcgtcatcggcgtcgccggcctccgcgtcgtcgacagctccaccttcaagtactcccccggcaccaacccgcaggccaccgtcatgatgctcggcaggtacatggggctgaagattcaggaggagggatggaggccaggacccagaaattaa

SEQ ID NO: 83 - DNA, 5011 bp, Triticum aestivum
  source 1..5011: mol_type = unassigned DNA
tttttgtgcccgtttactatttgctaccttgctgtttttatttatttaaattataaaaatatatttctatcatcaatattacacttttatcaccatctcttcgccgaactagtgcacctatacaatttgccattgtattgggtgtgttggggacacaagaaatttcttgtatttcgttgcagggttgttcgagagagaccatcttcatcatacacctcccacagattgataaactttaggtcatccacttgagggaaaattgctactgtcctacaaaactctgcgcttgaaggcccaacacgagtctacaagaataaagttgcgtagtagacatcatggcgcgatccgaaaggccggtggtgcgggcggagatggtggtgcgggcggcgcggatctgctggagcggcttcggccagaggaggagccggcctcgtggtcgtgcttccccttcctgatccaatgccagcccatggcgccggcgggaggtgggcgagtgggggtgcggcggcgctggctagggtttgctcgcttgtgttggggctggagaaggcaggccggccaggaagtggaagttgtgcactagccggtccacggcttccacattaagaaggacgacgacccctccgcccgtgtgaatgacaaccggggcccgctgctcgtgcgcattgaatttaggcggtggaggtaggtgggcggccaccacgcgtcccgaggcggacgacaagcaatcacgtgcctgtccgttcgacgtccgtgtagccgcaaatcgagcgcaagcgcatgtttgcgccgaaaatgggcggaccggacgcgaaacggacaaaatttacgaacatggtcacgcgttgggccatgtcgtatattcgttttggcctaaacagacaaacacagacaggatgggatcgtgcgttggagttggccttataccaaccaacacggtatgtccactgtgctagagttgctttcatgacagtgacttctcttcgagaaaaaggggcaatttcccagcataacactacggacaagatcaagcaggagttactgaagcacagatttaaaggtaaatttaaactaaatccacgacgagtaatttgaaatggagggagtacatcgggatttgaaggtgacaatcaccaccagatgacaacactcactagccattaagaaaaggctaattactttagcctgcatgcaaaggatcccgacgacgacgctgttctttctatcatcactcctccggatccctcggggggctcatctttgcactacctaggaatcaatcagcaacgcatctgcatccctaattggcaactactctttatctaatcgaattcgcatcacgattccaatctatataaacaaaacctccacattcccagcaatggcgaagctagattaccctgacgatattcatggcggcgcctggtcttcggggctcatccgtggcgctactcctcgccgcgacggttcttggctcattttacctcagactcgccgtctcgcagcagcagggccagggagaggaagctgcaggcgaggaggaggaggcgcagcggcagaggtacaacttccggttcgtgcggcacgcgcgggacgcgccgctggtgtcccactacaactacatcgtggtcggcggcggcacggcgggctgcccgctggcggccacgctgtcggagcgctcgcgcgtgctcctcctggagcgcggcggctacccgtacggcaaccgcaacgtgtccagcgagtaccacttcgcggacgcgctggcggacacgtcgccgcggtcgccggcgcagcggttcgtgtcggaggacggcgtcgtcaacgcccgcgcgcgcgtgctgggcggcgggagctgcctcaacgccggcttctacacgcgcgccagcagcgagtacgtgcgcgccgccgggtgggacgcgcgcctggtgaacgcgtcgtaccggtgggtggagcgcgagctggtgttccgcccggaggtgccgcgatggcagggcgcgctccgcgagggcctcctccaggccggcgtcaccccggacaacggctacaccgtcgaccacgtccccggcaccaagatcggcggcaccatcttcgacagcgccggccgccgccacaccgccgccgacttcctccgcagcgccaaccccaggcgcctcaccgtgttcctgcacgccaccgtgtcgcagatcctcttccggcgcagaggtacgtacatgcagcgcacgcacgcacgccatgcatgtgtacatacaagtcgtagtcgatcggtctgaaatgtatgcgtgcgtgtgccggaatgctgcagaggggtcggcgagccccgtggcgtacggcgtggtgttcacggacacgatgggggtgcagcaccgcgtgtacctgcggggcgtggggaggagcgaggtgatcctggcggcggggacgctggggagcccgcagctgctgatgctgagcggcgtcggcccgcgcgcgcacctggagaagcacggcgtccgcgccgtcgtggaccgccccatggtcgggcagggcgtggccgacaaccccatgaactcggtgttcgtcccgtcccccgtccccgtcgcgctctcgctggtccaggtcgtcggcgtcacccgcttcggcagcttcatcgagggcgtcagcggctcccagttcggcatccccctccactcccgccgccgcgcccactcctttggcatgttctcccccatggtattgacttgactgacaccacctccaaactaactcccaatgtgcaatggcaatgccatcgatgccttgacggagccctagattaactatgtgtgcgtgaatgatcaccaccagacggggcagctcgggacgctgccgccgagggagaggacggcgggggcgatgcggcgggcggcggaggtgatgcaggggctggaccggcgggcgttccggggcggcttcatcctggagaagatcctagggccgctctccacggggcacgtggagctgcggtcgacggacccgcacgcgaacccggcggtgaccttcaactacttccgggaccccagggacgtggagcggtgcgtgcgcgggatccagaccatcgagcgggtggtgcgctcgcgggccttctcccgcttcacctacgccaacgcgaccgccatggacgccgccttcgaccgcgccgcgctggccaagttcctcaacttgctgccccggcacccccgggacacgcgcccgctgcagcagtactgccgggacacggtgatgaccatctggcactaccacggcggctgccacgtcgggcccgtcgtcgacccggactaccgcgtcatcggcgtcgccggcctccgcgtcgtcgacagctccaccttcaagtactcccccggcaccaacccgcaggccaccgtcatgatgctcggcaggtcagaccaacaagatcctttctttctgctacaactcttcttcccctgcattcgatttgccccgacgaaatttgtcaaatgtttgtgtctacgtttcctggtcatttgcctgcctttggatgatgaaattcggtcgaacaggtacatggggctgaagattcaggaggagggatggaggccaggacccagaaattaagcatgcatgcattcgtccgttgattcatttcagccacggtcacccacccagccccaggctccaaccaaccgttcatgcttccttcgtgccgtggactgcttgggagattccatgggatttcttgtttctttcttctagagattgttttgtggactggttacatacacattgttgtttgttacatgtaatgtaacgtttgctggcataaaattgcacaacatttgtggaacagaacactttgcatccatcatttgtgcgatcaaaacactttgcattcatcccttttatacggccactttgcattgatcgttaatgtgttaatgtttgatccagaaagaaagaaattgccacttcattccaagagtttacacttcataaatcaaaacacaaaaggtgcatcaaatttggaatgcgaatgatccacgtccatgtctggatggtccagagctatatggccatatgtccagaccaagaaagtcatccaacgatcccgaacagatccaactatctgatatctcctcgtggcctcaaatggagggacagagatccagtgactggcctctggccaatcacgccgtaactggcggccagccaaccattggatgaaggatgggcagctcaaattaattactatagcagaacattgtagttggcattgtcaacaaaccctgtagaccgggtactgtagacgacctcctttagacagaatcactgtagaccgggtactattcatgcagatccatccgttgatccttgatcgaacagtttggagaagggggccagtcaccacagcaagtcactggatctcaatcccaaatggagggaagaagcagtggagtccaaactgtttgccatgttgggccgacaaccgggctccacctacaaatcccccgggctcctctctctcactctccgcctcacacctcgtgccctagttgtggcgattcttgtctgggctatgcctcggaattagatctacggtttctctgcatgttcagtgcattcgatcttgcgggtttagagtatgtgtccttgcaggaccagtctttcaaatctgttaagttttgtcagtgtgtctcagtgcttttgttagtttgattttttgtggagctagaatctttccttggcactacggcgaaaatcttgcggttcaacaatctgtacttctaggggatcatcccatcccaaattcattcacagctgaaggtttcccatatttttagatgggcgactaaaagggctctctaaaacctctatcggtaatcatgttcgtgcaggtgtactagcggtggcgtggtgtctttgttgaagccttggtagaattccgccttccaaaatttattaccataaagaagatgtatgtgagacatttcattggaattcttagttttgggagttacttcctacttttttggatctttga

SEQ ID NO: 84 - protein, 582 aa, Triticum aestivum
MAFFIVAILLGLLSVSQPARGVNYTFMREAMHAPPVTYYDYIVIGGGTAGCPLAATLSRRYRVLLLERGGSPYDDDRVLNMAHFSDVLSDTSASSPSQRFVSEDGVINSRPRVLGGGSCLNAGFFTRAGAGYTRAVGWDAREVLSAYRWVEDVVAFQPELGPWQAAVRRGLLETGVVPDNGFTFDHIPGTKVGGSIFDPDGRRHTAADLLQYARPEGIDVLLRARVARILFSYKGTKPVARGVVYRDSLGMVHVAYLNQGDANEIILSAGALGSPQLLMLSGVGPSDHLRSFGLDVVVDNPGVGQGMSDNPMNAIYVPSPSPVEVSLIQVVGITRFGSYIEGASGSDWTTRTASSSGDGARQARVFGMFSPQTGQLPTVPPKQRTPEAIARAVEAMSRVPDAALRGGFILEKVLGPQSTGSLALRNLDPDDNPIVQFNYFAHPDDLRRCVAGIEAIERVIRSRSFSRFAYPNFAFPAMLNVTAEFPANLMRVRGGSDPAALERFCRDTVMTIWHYHGGCQVGRVVDRDYRVLGIDALRVIDGSTFNASPGTNPQATVMMLGRYMGVKIEKERTLIEGGARKL

SEQ ID NO: 85 - DNA, 1749 bp, Triticum aestivum
  source 1..1749: mol_type = unassigned DNA
atggcattcttcatcgtcgccatcttgcttggactcctctccgtctctcaaccagcgcgaggtgtaaactacacgttcatgagggaggcgatgcacgcgccgccggtgacctactacgactacatcgtcatcgggggcggcacggcgggctgcccgctggcggcgacgctgtccaggcgctaccgcgtgctgctgctggagcgcggcgggtcgccctacgacgacgaccgcgtgctcaacatggcgcacttctcggacgtgctctcggacacgtccgcgtcgtccccgtcgcagcggttcgtgtccgaggacggcgtgatcaactcgcggccgcgggtgctgggcggcggcagctgcctcaacgccggcttcttcacgcgcgccggcgccggctacacgagggccgtcggctgggacgccagggaggtgcttagcgcctacaggtgggtggaggacgtggtggcgttccagccggagctggggccgtggcaggcggcggtgcgccgcgggctgctggagaccggcgtggtgccggacaacgggttcacgttcgaccacatccccggcaccaaggtcggcgggtccatcttcgacccggacggccggcgccacacggcggccgacctgctgcagtacgcgcgccccgaagggatcgacgtgctcctccgggcccgagtggccaggatcttgttcagttacaaagggaccaagcccgtggcgcgcggcgtggtgtaccgcgactcgctgggcatggttcacgtggcgtacctcaaccagggcgacgccaacgagatcatcctgtcggcgggggcgcttggcagtccgcagctgctgatgctcagcggcgtcgggccctccgaccacctccggtcgttcggcctcgacgtcgtcgtcgacaaccccggggtcgggcagggcatgtccgacaaccccatgaacgccatctacgtgccgtcgccgtcgccggtcgaggtgtcgctcatccaggtcgtcggcatcaccaggttcggcagctacatcgagggcgccagcggctccgactggaccacccgcaccgcctcctccagcggcgacggcgcgcgacaagcccgcgtcttcggcatgttctccccgcagacggggcagctcccgacggtgcccccgaagcagcgcacgccggaggccatcgcgcgcgccgtggaggccatgagccgggtaccggacgcggcgctccgcggcggcttcatcctggagaaggtcctcggcccgcagtccacgggcagcctcgcgctccgcaacctggaccccgacgacaaccccatcgtccagttcaactacttcgcccacccggacgacctccggcgctgcgtcgccggcatcgaggccatcgagcgggtcatccgctccaggtccttctcgcggttcgcgtaccccaacttcgcgttcccggcgatgctcaacgtcacggcggagttcccggcgaacctgatgcgcgtgcgcggcggtagcgaccccgcggcgctcgagcggttctgcagggacaccgtcatgaccatctggcattaccacggcgggtgccaggtcggcagggtcgtcgaccgcgactaccgggtcctcggcattgatgcgctgcgcgtcatcgacggctccacgttcaacgcctcgccggggaccaacccgcaggccaccgtcatgatgctcggcaggtacatgggagtcaaaatcgaaaaggagaggacgctgatcgaaggaggagcgagaaaactgtag

SEQ ID NO: 86 - DNA, 4909 bp, Triticum aestivum
  source 1..4909: mol_type = unassigned DNA
aaaattaatcactactaagccctgaagcataagcaagactacaatttgggtccaattaacatttgcagactacgtaattctagttagctactacaacctccttgcatcgtacctacatgccatacgtcaagctgaatgggttggcatcagttttaaaatttgacaaatgttgagtgtcacgatatgccgcaactgaatgggttggcatttagtcgagcagctcatgggcgtggcggccttagtccatggcgggcagccgcatgtcttggctgaagtgggaggattaggcagtggctggagaagatgcgtggtacgtgcagagcgggtgcagcttaagatgccgcagaagcttgtgtaccctgaggcctgcagcgctcggctccgggccactggctcccgcgcttgccattgccacacatggtcggttctgccaagaaggttgtgccgttcatcgagaagagacggtaaacaatggcgacattcagcggagacagggatcccgtggatgatgtggtgaggaaccaggggcggtggtcagcggcaaactccatcgatggcggttgccagcggagaggtcgcggatggacggccggagaggcagcaccggtggcctggacggccaagccgtcggtcggagaggcggtggcagggcggattgacctcgatctcctggcgctccattttttttccgcgtgcgagaacgacgaagagataagccagccaatgcaacccaatacggagggtcggggctctgaatttgcgagggggttagccagtgctcgggttggcctctcgatattgggaccgaattccagagacgaatatctagaccatccaaacggtggcattcgggaccgacaaacaggcaattccgaatacttgctccgaatgtctacatccaaacaggcaaagaagatttgtaaagcacagatgccatggctagtttctgatggggggacagagaagagcataggagaatgcattggtctgcatggtggcgaatgtgtttgcccaaatgcaaaggtggtgtgggttttcgacgaccccctggcgtttgtttgccggtagtagaaatagcagacaagtacgggacagagccagttatcattgccgaacccgtcgaacaaatttagccgacgcaaaggctgcggagcaccaagagcggaggcttgttccactagcatgcgccgtggaactaccaacccatgcaagatgcaacacaacggtttcttttgaaaactctgctgcttggccagtatataaaaggacacccgctgctgcaagtaagccacatcagacacagaagttctcagcgcaggcagacacaaggtcacaggctatggcattcttcatcgtcgccatcttgcttggactcctctccgtctctcaaccaggtgatcaatcttcttccgttgcccatttcagtcgcattcttgagcatttgcgtcgtgcggtgttgctgatcttgcgattgtgcatggcagcgcgaggtgtaaactacacgttcatgagggaggcgatgcacgcgccgccggtgacctactacgactacatcgtcatcgggggcggcacggcgggctgcccgctggcggcgacgctgtccaggcgctaccgcgtgctgctgctggagcgcggcgggtcgccctacgacgacgaccgcgtgctcaacatggcgcacttctcggacgtgctctcggacacgtccgcgtcgtccccgtcgcagcggttcgtgtccgaggacggcgtgatcaactcgcggccgcgggtgctgggcggcggcagctgcctcaacgccggcttcttcacgcgcgccggcgccggctacacgagggccgtcggctgggacgccagggaggtgcttagcgcctacaggtgggtggaggacgtggtggcgttccagccggagctggggccgtggcaggcggcggtgcgccgcgggctgctggagaccggcgtggtgccggacaacgggttcacgttcgaccacatccccggcaccaaggtcggcgggtccatcttcgacccggacggccggcgccacacggcggccgacctgctgcagtacgcgcgccccgaagggatcgacgtgctcctccgggcccgagtggccaggatcttgttcagttacaaaggtatagtcttgtttaaagaacgcactgccaactgaccgttaagttcgttaacggtataaagtcaagcaatattgccgtggcgcgaatgatttggtcgacgagttcgggcgccaacgagttttttcggtttgcagggaccaagcccgtggcgcgcggcgtggtgtaccgcgactcgctgggcatggttcacgtggcgtacctcaaccagggcgacgccaacgagatcatcctgtcggcgggggcgcttggcagtccgcagctgctgatgctcagcggcgtcgggccctccgaccacctccggtcgttcggcctcgacgtcgtcgtcgacaaccccggggtcgggcagggcatgtccgacaaccccatgaacgccatctacgtgccgtcgccgtcgccggtcgaggtgtcgctcatccaggtcgtcggcatcaccaggttcggcagctacatcgagggcgccagcggctccgactggaccacccgcaccgcctcctccagcggcgacggcgcgcgacaagcccgcgtcttcggcatgttctccccgcagacggggcagctcccgacggtgcccccgaagcagcgcacgccggaggccatcgcgcgcgccgtggaggccatgagccgggtaccggacgcggcgctccgcggcggcttcatcctggagaaggtcctcggcccgcagtccacgggcagcctcgcgctccgcaacctggaccccgacgacaaccccatcgtccagttcaactacttcgcccacccggacgacctccggcgctgcgtcgccggcatcgaggccatcgagcgggtcatccgctccaggtccttctcgcggttcgcgtaccccaacttcgcgttcccggcgatgctcaacgtcacggcggagttcccggcgaacctgatgcgcgtgcgcggcggtagcgaccccgcggcgctcgagcggttctgcagggacaccgtcatgaccatctggcattaccacggcgggtgccaggtcggcagggtcgtcgaccgcgactaccgggtcctcggcattgatgcgctgcgcgtcatcgacggctccacgttcaacgcctcgccggggaccaacccgcaggccaccgtcatgatgctcggcaggtagtgtttcctctcgtttcacgctaatttctggcagtgttcgtgccgcgatggatcaactgatgtgcgcccgtgctttgtaacctgacggacaggtacatgggagtcaaaatcgaaaaggagaggacgctgatcgaaggaggagcgagaaaactgtagcggggtataaccactaggctgttatctgcgtacaggcgtactgcagtcgctatttgctttcaggattcttttaggagtctccatacagagtggaatgcatgctaattgtaattgatgaagttttacaaatggtgtaagccaatgccgcaccttattgtgagatttgttgatgcgttaactgaatctatgtactaaacctgctttggccgtgtgcatcatgatgctccacaggcctaggccttccccctttttgggaagaaaaaggtatactaaacttacgaaatcactaattgagaagtacccgttgcaaagatcacttcaattccctctggttgtgacaagtggcgcacatgcatcgcgtcacttgtcgcaacctgggagtttttccttttttttagattcgtttattcaaaacgttttatctcttaaatcgtgcatccaaatcttgaaccactttcgctgttggattcttcgcgctgagatcttcaaaactagattccatgttgataggttttgacgaacttttttttcacgaaaaaacccgaacgaaagaaccgaaccgggagcacgggttttttgccttttcgaaagaggcacgcccgtgcctctcacaaaatcacaatcgtgcctctcgcggaagtaaaaccgtgactcttgcggaaggaaaaaaaaaaagaaaacgcgtttttttttcatttccgaggagacaccgccgtgactctcgtggaaacacaaccgtacctattgcggaagcaaaaccgtgactctcgcgaaagaaaaaaaaacagaaaacatgttttttcccttttcgagagggacgcccgtgactctcaaagaaagcacaatcatgcctctcgcggaagcaaaatcgtgactctcgtaaaaaaacagaaaacacgttttttttcgttcccaagaggcacggccgtgactttcgcgaaagcacacccgtgcctctcgcggaagcaaaaccgtgactctcgcgaaagaaaaaaaaacagaaaacacgtttttttcgttttcgagaggcacggccgtgactctcgcgaaaggacacccgtgcctctcgcggaagcaaaaccgtgactctcgtgaaaggaaaaaaacgcgttttttcgtggtatttttttttccaatttttttaattgaaaagctgaggaagaccggtggaaaaccaaaacattgaaaaacccaaaaaaaatcgtttaaaaagccgaaaacatgtgcggaagaataaaaaaataaaatccggagggagcgcccagagcgcgacacgtgacgaattgctgagagcgcgccaagtgacgctgattgttgcgaaactcccgaaggagcgctcgttaactagttgctctcctaaacttgctacaagaatgtgcttattttattgctagaatgacgaggaaacaaaagaacttttatttagaagaggaaaaaagcttgacttgccaaaagtatagttgacgccttgccccttcccctctcctccggcaccgggacgc

SEQ ID NO: 87 - protein, 582 aa, Triticum aestivum
MAFFIITILLGLLSVSQPARGVNYTFMREAMHAPPVTYYDYIVIGGGTAGCPLAATLSRRYRVLLLERGGSPYDDDRVLNMAHFSDVLSDTSASSPSQRFVSEDGVINSRPRVLGGGSCLNAGFFTRAGVGYTRAVGWDASEVLSAYKWVEDVVAFQPELGPWQAAMRRGLLETGVVPDNGFTYDHIPGTKVGGSIFDPDGRRHTAADLLQYARPEGIDVLLRARVARILFSYKGTKPVARGVVYRDSLGMVHVAYLNQGDANEIILSAGALGSPQLLMLSGVGPSDHLRSFGLDVVVDNPGVGQGMSDNPMNAIYVPSPSPVEVSLIQVVGITRFGSYIEGASGSDWTTRTAASSGDGARQARVFGMFSPQTGQLPTVPPKQRTPEAIARAVDAMSQVPDAALRGGFILEKVLGPQSTGSLALRNLDPDDNPIVQFNYFAHPDDLRRCVAGIEAIERVIRSRSFSRFAYPNFAFPAMLNVTAEFPANLMRVRGGSDPAALERFCRDTVMTIWHYHGGCQVGRVVDRDYRVLGIDALRVIDGSTFNASPGTNPQATVMMLGRYMGVKIEKERTLIEGGARKL

SEQ ID NO: 88 - DNA, 1749 bp, Triticum aestivum
  source 1..1749: mol_type = unassigned DNA
atggcattcttcatcatcaccatcttgcttggactcctctccgtctctcaaccagcgcgaggtgtcaactacacgttcatgagggaggcgatgcacgcgccgccggtgacctactacgactacatcgtcatcgggggcggcacggcgggctgcccgctggcggcgacgctgtccaggcgctaccgcgtgctgctgctggagcgcggcgggtcgccgtacgacgacgaccgcgtgctcaacatggcgcacttctcggacgtgctctccgacacgtccgcgtcgtccccgtcgcagcggttcgtgtccgaggacggcgtgatcaactcgcggccgcgggtgctgggcggcggcagctgcctcaacgccggcttcttcacgcgcgccggcgtcggctacacgagggccgtcggctgggacgccagcgaggtgctcagcgcctacaagtgggtggaggacgtggtggcgttccagccggagctggggccgtggcaggcggcgatgcggcgcgggctgctggagaccggtgtggtgccggacaacgggttcacgtacgaccacatccccggcaccaaggtcggcgggtccatcttcgaccccgacggccggcgccacacggcggccgacctgctgcagtacgcgcgccccgaagggatcgacgtgctcctccgggcccgagtggccaggatcttgttcagttacaaagggaccaagcccgtggcgcgcggcgtggtgtaccgcgactccctgggcatggtgcacgtggcgtacctcaaccagggcgacgccaacgagatcatcctgtcggcgggggcgctgggcagcccgcagctgctgatgctcagcggcgtcgggccctccgaccacctccggtcgttcggcctcgacgtcgtcgtcgacaaccccggggtcgggcagggcatgtccgacaaccccatgaacgccatctacgtgccgtcgccgtcgcccgtcgaggtgtcgctcatccaggtcgtcggcatcaccaggttcggcagctacatcgagggcgccagcggctctgactggaccacccgcaccgccgcctccagcggcgacggcgcgcgacaagcccgcgtcttcggcatgttctctccgcagacggggcagctcccgacggtgcccccgaagcagcgcacgccggaggccatcgcgcgcgccgtggacgccatgagccaggtgccggacgcagcgctccgcggcggcttcatcctggagaaggtcctcggcccgcagtccacgggcagcctcgcgctccgcaacctggaccccgacgacaaccccatcgtccagttcaactacttcgcccacccggacgacctccggcgctgcgtcgccggcatcgaggccatcgagcgggtcatccgctccaggtcgttctcccggttcgcgtaccccaactttgcgttcccggcgatgctcaacgtcacggcggagttcccggcgaacctaatgcgcgtgcgcggcggcagcgaccccgcggcgctcgagcggttctgcagggacaccgtcatgaccatctggcattaccacggcgggtgccaggtcggcagagtcgtcgaccgcgactaccgggtcctcggcattgatgcgctgcgcgtcatcgacggctccacgttcaatgcctcgccggggaccaacccgcaggccaccgtcatgatgctcggcaggtacatgggagtcaaaatcgaaaaggagaggacgctgatcgaaggaggagcgagaaaactgtag

SEQ ID NO: 89 - DNA, 4828 bp, Triticum aestivum
  misc_difference 48: note = a, c, t, g, unknown or other
  source 1..4828: mol_type = unassigned DNA
agcccatatatggggcggatgtgggaagacccggatgcattggccacntcatgtccagtgccggtagcgcgaccagcggcagatttggtagcgactcagacctcattgactgggacgtcccgcttcgctcggaggacgatgagtaacttgtcccctcttcatcacgttggcatgatagtgcgtggataggggcgggaactggagctctacgtcttcccctatcgctaagcgtcccaatgcgaatgatgacaccgggtccacgcactctgtcgtgcgatccgcatgctctctccactggtgaaggagcagagccgagcctcaggtcacctcacgagcttcatctcatccgactccgacgatagcgacacgaccaccacggaagacgatgacacccctccgaccacggacgcctacacggaggacaactaccgccactccgatgattgcaagagcaagggcttggcgcagatatggtgaactccggctcctaggggcggcgctaggccccaggcaatggggaccttggcctagggcgtggctgctccatcctttgttcaccgattcaccggtgcagacaatgttcattactgtagccgtacttttggcctgggacgtagcctattcctagctccgctactgccagcaccgtatctatctagtttacctatctagtgcccggcgacgaactgcttcttttgatccagtagtacatgtctggtgatgaattttgttgctatgcccgtttctttctatgattgctatgtagtttatctcatgttgcatggatttggatggccggatatgagggggacgactgcgaacactaagaaatccacaaagttagcacatctttttttttctcctcttgcgaaaacactggttaaactgttttttttagaaaggttaaactgctttatgactaccgtggctgcagggtgcgccactgcccacccttgccactaggctacagcctagttctcgattttgttggttgtcaaagagttgatctgatggtgtgtatattagagtggctatacattctcgacgaccccctggcgtttgtttgccggtagtagaaatagcagacaagtacgggacagagcgttatcattgccgaacccgtcgaacaaatttagccgacgcaaaggctgcggaggagcaccaagagcggaggcttgttccactagcatgcgcctagtgccacgccgtgtaactaccaacccatgcaagatgcaacacaacggtttcttttgaaaactctgctgcttggccagtatataaaggacacccgctgttgcaagccggccacatcagaaacagaagttcccagcgcaggcaggcacgagccatggcattcttcatcatcaccatcttgcttggactcctctccgtctctcaaccaggtgctcaatcttctcccgctacccatttcagtcgcgttcttgagcatttgcgttgtgcggtgttgctgattcttgcgactgcgcatggcagcgcgaggtgtcaactacacgttcatgagggaggcgatgcacgcgccgccggtgacctactacgactacatcgtcatcgggggcggcacggcgggctgcccgctggcggcgacgctgtccaggcgctaccgcgtgctgctgctggagcgcggcgggtcgccgtacgacgacgaccgcgtgctcaacatggcgcacttctcggacgtgctctccgacacgtccgcgtcgtccccgtcgcagcggttcgtgtccgaggacggcgtgatcaactcgcggccgcgggtgctgggcggcggcagctgcctcaacgccggcttcttcacgcgcgccggcgtcggctacacgagggccgtcggctgggacgccagcgaggtgctcagcgcctacaagtgggtggaggacgtggtggcgttccagccggagctggggccgtggcaggcggcgatgcggcgcgggctgctggagaccggtgtggtgccggacaacgggttcacgtacgaccacatccccggcaccaaggtcggcgggtccatcttcgaccccgacggccggcgccacacggcggccgacctgctgcagtacgcgcgccccgaagggatcgacgtgctcctccgggcccgagtggccaggatcttgttcagttacaaaggtagtcttgtttaaagattgcactgccaactgaccgttaagttcgttaacggtataaagtcaagcaatattgccgtggcgcgaatgatttggtcgacgagttcgggcgccaacgaatttttttggtttgcagggaccaagcccgtggcgcgcggcgtggtgtaccgcgactccctgggcatggtgcacgtggcgtacctcaaccagggcgacgccaacgagatcatcctgtcggcgggggcgctgggcagcccgcagctgctgatgctcagcggcgtcgggccctccgaccacctccggtcgttcggcctcgacgtcgtcgtcgacaaccccggggtcgggcagggcatgtccgacaaccccatgaacgccatctacgtgccgtcgccgtcgcccgtcgaggtgtcgctcatccaggtcgtcggcatcaccaggttcggcagctacatcgagggcgccagcggctctgactggaccacccgcaccgccgcctccagcggcgacggcgcgcgacaagcccgcgtcttcggcatgttctctccgcagacggggcagctcccgacggtgcccccgaagcagcgcacgccggaggccatcgcgcgcgccgtggacgccatgagccaggtgccggacgcagcgctccgcggcggcttcatcctggagaaggtcctcggcccgcagtccacgggcagcctcgcgctccgcaacctggaccccgacgacaaccccatcgtccagttcaactacttcgcccacccggacgacctccggcgctgcgtcgccggcatcgaggccatcgagcgggtcatccgctccaggtcgttctcccggttcgcgtaccccaactttgcgttcccggcgatgctcaacgtcacggcggagttcccggcgaacctaatgcgcgtgcgcggcggcagcgaccccgcggcgctcgagcggttctgcagggacaccgtcatgaccatctggcattaccacggcgggtgccaggtcggcagagtcgtcgaccgcgactaccgggtcctcggcattgatgcgctgcgcgtcatcgacggctccacgttcaatgcctcgccggggaccaacccgcaggccaccgtcatgatgctcggcaggtagcattcctctcgtaatctcgtttcacggtaatttttggcagtgttcgtgccacgatggatcaactgatgtgcgcccgtgctttgtaacctgacggacaggtacatgggagtcaaaatcgaaaaggagaggacgctgatcgaaggaggagcgagaaaactgtagcggggtagaaccacaagcctgttatctgcgtacaggcgtactgcagttgctatttgctttcaggattcttttaggagtctccgtacagagtggaatgctaattgtaattgatgaaattttacaaattgtgtaagccaatgccgcaccttattgtgaaacttgtcgatgcgttaaccgaatctatgtactaaacctgctttggctgtgtgcataatgatgctgcacaagcctaggccttccccctttttgaaaaaaaagtgtactaaacgagtgcggcgtttctgctcccgaactcatctgcatccctacttacaaaaaaaatcaaaataaatactattttttttaaaaaaaatcaatattttttgtgtggtagataagtttatgtgtgaggtgcgtttcaaatttcaactcatttggacatgtgagcaattctcatcaaaaaagataaattcagtgtatgtaaaaaagtttactgttcacacactgttctgatctgatttgtttttttttgttgagagctgctcagatgtccaaataagttgaaatttggagcgaacctcacgcatagaaatgtctttcacacacaaaaaattgggttttgtttgaaattttttagtatttgttttgatttttttaatcaggtgcagatgagcttgggcaccaaattgtattttcggtactaaactttctacaagaatgtgcctattttattgctagaatgacgaggaaaccaaaaaaaaatagaacaggaaaaaaacttgacttgccaaaaatatagttgacgccttgccccttccccctctcctccggcaccgggacgctgccggggacatctctgtcatcatcgtcgccatcaacttctccggcgttctcatgatggtgatgtgtgagtagttcatcctctgggctgagggtatgtattggtagctatgttttttatctctttctttctctccatgtctttgatggattcgatcttgatgtatcatgagctttattaataaagttggatcatatgatgttcatctcactctattgttttgttggtgaattgggtcttgctctttgaagtttctttatgttggattgaatactttggatttgagattacatgatgcatgtctagtaattaacttgtcgataccatagttacattagagtactcttagcataaaggttgaacgataagtattatatgtgttgtcatagtacgatttctgggattgtcctggcacttagtgggtggttcaatagatcaagattggaaaaacaatatgcaatttcatcatacttcctatagaaatagaaactttgaagtgattctttgctgcactctaagggactagcatgcggtttaattatgttaataatgttgagagttggcactagcgaaagtatgaacccta

SEQ ID NO: 90 - protein, 582 aa, Triticum aestivum
MAFFIATMLLGLLSVSQPARGVNYTFMREAMHAPPVTYYDYIVIGGGTAGCPLAATLSRRYRVLLLERGGSPYDDDRVLNMAHFSDVLSDTSASSPSQRFVSEDGVINSRPRVLGGGSCLNAGFFTRAGVGYTRAVGWDASEVLSAYRWVEDVVAFQPELGPWQAAVRRGLLETGVVPDNGFTYDHIPGTKVGGSIFDPDGRRHTAADLLQYARPEGIDVLLRARVARILFSYKGTKPVARGVVYRDSLGIVHVAYLNQGDANEIILSAGALGSPQLLMLSGVGPSDHLRSFGLDVVVDNPGVGQGMSDNPMNAIYVPSPSPVEVSLIQVVGITRFGSYIEGASGSDWTTRTASSSGDGARQARVFGMFSPQTGQLPTVPPKQRTPEAIARAVEAMSQVPDAALRGGFILEKVLGPQSTGSLALRNLDPDDNPIVQFNYFAHPDDLRRCVAGIEAIERVIRSRSFSRFAYPNFAFPAMLNVTAEFPANLMRVRGGSDPAALERFCRDTVMTIWHYHGGCQVGRVVDRDYRVLGIDALRVIDGSTFNASPGTNPQATVMMLGRYMGVKIEKERTLIEGGARKL

SEQ ID NO: 91 - DNA, 1749 bp, Triticum aestivum
  source 1..1749: mol_type = unassigned DNA
atggcattcttcatcgccaccatgttgcttggactcctctccgtctctcaaccagcgcgaggtgtaaactacacgttcatgagggaggcgatgcacgcgccgccggtgacctactacgactacatcgtcatcgggggcggcacggcgggctgcccgctggcggcgacgctgtccaggcgctaccgcgtgctgctgctggagcgcggcgggtcgccgtacgacgacgaccgcgtgctcaacatggcgcacttctccgacgtgctctcggacacgtccgcgtcgtccccgtcgcagcggttcgtgtccgaggacggcgtgatcaactcgcggccgcgggtgctgggcggcggcagctgcctcaacgccggcttcttcacgcgcgccggcgtcggctacacgagggccgtcggctgggacgccagcgaggtgctcagcgcctacaggtgggtggaggacgtggtggcgttccagccggagctggggccgtggcaggcggcggtgcggcgcgggctcctggagaccggggtggtgccggacaacgggttcacgtacgaccacatccccggcaccaaggtcggcgggtccatcttcgaccccgacggccggcgccacacggcggccgacctgctgcagtacgcgcgccccgaagggatcgacgtgcttctccgggcccgagtggccaggatcttgttcagttacaaagggaccaagcccgtggcgcgcggcgtggtgtaccgcgactcgctgggcatcgttcacgtggcgtacctcaaccagggcgacgccaacgagatcatcctgtcggcgggggcgctgggcagcccgcagctgctgatgctcagcggcgtcgggccctccgaccacctccggtcgttcggcctcgacgtcgtcgtcgacaaccccggggtcgggcagggcatgtccgacaaccccatgaacgccatctacgtgccgtcgccgtcgcccgtcgaggtgtcgctcatccaggtcgtcggcatcaccaggttcggcagctacatcgagggcgccagcgggtccgactggaccacgcgcaccgcctcctccagcggcgacggcgcgcgacaagcccgcgtcttcggcatgttctccccgcagacggggcagctcccgacggtgcccccgaagcagcgcacaccggaggccatcgcgcgcgccgtggaagccatgagtcaggtgccggacgcagcgctccgcggcggcttcatcctggagaaggtcctcggcccgcagtccacgggcagcctcgcgctccgcaacctggaccccgacgacaaccccatcgtccagttcaactacttcgcccacccggacgacctccggcgctgcgtcgccggcatcgaggccatcgagcgggtcatccgctccaggtcgttctcgcggttcgcgtaccccaacttcgcgttcccggcgatgctcaacgtcacggcggagttcccggcgaacctgatgcgcgtgcgcggcggcagcgaccccgcggcgctggagcggttctgcagggacaccgtcatgaccatctggcattaccacggcgggtgccaggtcggtagagtcgtcgaccgcgactaccgggtcctcggcattgatgcgctgcgcgtcatcgacggctccacgttcaatgcctcgccggggaccaacccgcaggccaccgtcatgatgctcggcaggtacatgggagtcaaaatcgagaaggagaggacgctgatcgaaggaggagcgagaaaactgtag

SEQ ID NO: 92 - DNA, 5177 bp, Triticum aestivum
  source 1..5177: mol_type = unassigned DNA
ttggctggggctggcagtacttcttcgagcgccacaagatcgtccccaacgacctcgtcgtgctgcgcatctccggcctaagactgagggtccaaatctacaaccacgaaagctccatcaggtgcagggtgaattgcagtaggcacagctgcatcggtgactttgctttcgtcctctgaacttgtttgtatgaacttgtagttagtttgctgcggtgatgggagaacttgctgtgaacttgttattattttgtccaggattcagcaccttgtggtgaagcagggggcatgggatacccctaatgtctttaaaattatgcctgttagcaatatgtctgtttagttgcttgtttatctgttgttagctgttctttacttgctagtttatgtgctgttagtgctctgcctgctgttgtgcctaatgtggtggtaaggccacatcatttaaatggggtgagcagaacacaaatgtgtatgcagccaaacagctgtggtctgcatctgctcaccctttaagtacaaatacgagcaaccaaacagccgaccctaaagtggtcattgatgcaatacgggcaaccaaacaacatgcatatgttgatttgttgcctgtttttggtgaaccaaactctgatgagatgtggctgaaatgcagacactattcactctagacaaccaaacacatgctaagaaatccacaaagttaacacatctttttcttttcttttgcgaaacactggttaaactgttttatgactacacaacgagcacctttttcctctctagggaatatatattcacctttggtcaatactacctagtaaaaaatgatcaaaaatactccctctgtctaaaaaataagcgactcaattttgtactagctttagtataaagttagtactaagttagtacaaagttgagtcacttattttgggacgtatggagtacctgataaaaaatgatcttgttagttgtcaagagttaatctgatggtgtatattggagtagctatacattctccacaaaaccctggcgtttgtttgccggtagtagaaatagcagaaagtacgggacagagtatcatagccgaacccgtcgaacaaatttagccgacgcaaaggctgcggagcaccaagagcggaggcttgttccagtagcatgcgcctagtgctacgccgtggaactaccaacccatgcaagatgcaacacaacggtttcttttgaaaacttggattgcttggccagtatggcagtatataaaggacatccgatactgcaagtcagccacatcagacacagaagttctcagcgcaggcagcacaaggtcacaagccatggcattcttcatcgccaccatgttgcttggactcctctccgtctctcaaccaggtgctcaatcttcttccgctacccatttcagtcgcattcttgagcatttgcgttgtgcggcgttgctgattcttgcgactgtgcatggcagcgcgaggtgtaaactacacgttcatgagggaggcgatgcacgcgccgccggtgacctactacgactacatcgtcatcgggggcggcacggcgggctgcccgctggcggcgacgctgtccaggcgctaccgcgtgctgctgctggagcgcggcgggtcgccgtacgacgacgaccgcgtgctcaacatggcgcacttctccgacgtgctctcggacacgtccgcgtcgtccccgtcgcagcggttcgtgtccgaggacggcgtgatcaactcgcggccgcgggtgctgggcggcggcagctgcctcaacgccggcttcttcacgcgcgccggcgtcggctacacgagggccgtcggctgggacgccagcgaggtgctcagcgcctacaggtgggtggaggacgtggtggcgttccagccggagctggggccgtggcaggcggcggtgcggcgcgggctcctggagaccggggtggtgccggacaacgggttcacgtacgaccacatccccggcaccaaggtcggcgggtccatcttcgaccccgacggccggcgccacacggcggccgacctgctgcagtacgcgcgccccgaagggatcgacgtgcttctccgggcccgagtggccaggatcttgttcagttacaaaggtagtcttgtttaaagattgcactgccaactgaccgtcaagttcgttaacggtataaagtcaagcaatattgccgtggcgcgaatgatttggtcgacgagttcgggcgccaacgagttttgttttttggtttgcagggaccaagcccgtggcgcgcggcgtggtgtaccgcgactcgctgggcatcgttcacgtggcgtacctcaaccagggcgacgccaacgagatcatcctgtcggcgggggcgctgggcagcccgcagctgctgatgctcagcggcgtcgggccctccgaccacctccggtcgttcggcctcgacgtcgtcgtcgacaaccccggggtcgggcagggcatgtccgacaaccccatgaacgccatctacgtgccgtcgccgtcgcccgtcgaggtgtcgctcatccaggtcgtcggcatcaccaggttcggcagctacatcgagggcgccagcgggtccgactggaccacgcgcaccgcctcctccagcggcgacggcgcgcgacaagcccgcgtcttcggcatgttctccccgcagacggggcagctcccgacggtgcccccgaagcagcgcacaccggaggccatcgcgcgcgccgtggaagccatgagtcaggtgccggacgcagcgctccgcggcggcttcatcctggagaaggtcctcggcccgcagtccacgggcagcctcgcgctccgcaacctggaccccgacgacaaccccatcgtccagttcaactacttcgcccacccggacgacctccggcgctgcgtcgccggcatcgaggccatcgagcgggtcatccgctccaggtcgttctcgcggttcgcgtaccccaacttcgcgttcccggcgatgctcaacgtcacggcggagttcccggcgaacctgatgcgcgtgcgcggcggcagcgaccccgcggcgctggagcggttctgcagggacaccgtcatgaccatctggcattaccacggcgggtgccaggtcggtagagtcgtcgaccgcgactaccgggtcctcggcattgatgcgctgcgcgtcatcgacggctccacgttcaatgcctcgccggggaccaacccgcaggccaccgtcatgatgctcggcaggtagtgtttcctctcgtttcacggtgatttttggcagtgttcgtgccacgatggatcaactgatgcgcgcccgtgctttgtaacctgatggacaggtacatgggagtcaaaatcgagaaggagaggacgctgatcgaaggaggagcgagaaaactgtagcggggtataaccactaggctgttatctgcgtacaggcgtactgcagttgctatttgctttctggattcttttaggagtctccatacagagtggaatgctaattgtaattgatgaagttttacaaattgtgtaagccaatgccgcaccttattgtgagatttgtcgatgcgttaaccgaatctatgtactaaacctgctttggctgtgtgcatcatgatgctgcagaggcctaggccttcccccttttcggggaaaaaaaggtgtactaaatttgctacaagaatgtggctattttattgctagaatggtgaggaaacaaaaaactttttttagaacaggaaaaaagcttgacttgccaaaaatatagcttgacgctgccggggacatctctgtcattgccgtcaccatcaacttctcctgcattctcatgatggtgatgtatgagtagttcatcctcgggggctgagagtatgtattggtagctatgtttttttatctctttctttctctctcatgtttttgatgggtttgatcttgatgtatcatgagctttattaataaagttggatcgtatggtcttcatctcactttattctttttttttggtgaattggatcttgctatttgaagtttctttatgttggattgaatattttggatttgagattacatgatgcatgtctagtaattaacttgcagatacccatagtgacattagagtactcttagcataaaggttgaacgataagtattatatgtgtcgtcatagtacaatttccgggattgtcctggcactttgtgggtggttcaatagatcaagattggaaagacaatatgcaattgcatcctacttcctctgatagaaatagaaactttggagtgattcttttgctgcactctaagggattagcatgcgatttaattatgttaataatgttgagagatggcactagcgaaagtatgaaccctaggccttgtttccaagcatccagacaccatttttacgcacttttgttacttgctaccttactatttttatttgtttaggttacaaaaatatatttctaccatccatattacacatctattatcatccattcgccaaactagtgcatctatagaactgacgattgtattaggtgtgttggggacataaaagaccacttgtatttccttgcagggttgtttgagagagaaccaccttcatcctacatctctcatggattaataaatcttaggtcatccacttgaggaaactttgctactttctacaaaactttacgcttggaggtccaacaaagtctacaagaataaagttgcgtggtagacatcatcgccacattctagagggtgtcgtcgttctacatgaaaccttacatgaaattcattaaaagaaacttgatggagttgtcttcaatgtggattttgagaaggcttatgataaagttaagtggccatttctgcaacaggccctgtgtatgaagggtttcaaatcggcctggaggaagcagatcgaagcctttgtacaaggaggcagtgtcgggatcggggtaaatgatgatgtaggtcattatttccagacacaaaaaggaccacgtcagggggatccggtgtgtcctatccagttcaagattgttacacatatgttggtggtgctcattggtagagccaaagaggaaggctaggtcggagggctcatcccacatctcgtggatggggggtgcgtccatactacaatacgctgatcatacaataattttcatggagcatgacatg

SEQ ID NO: 93 - protein, 246 aa, Triticum aestivum
MVSAQVARNIVGIIGNVISFGLFLSPVPTFWRIYKAKDVEEFKPDPYLATLMNCLLWFFYGLPIVHPNSTLVLTINGIGLVIEGAYIIIFIIYAAKNTRWKMLGVLALEAAFMAVVVAGVLLGAHTHEKRSMIVGILCVIFGSIMYASPLTIMGKVIRTKSVEYMPFFLSLVNFLNGCCWTGYALIKFDIYITIPNALGTIFGLIQLILYFYYYRLTPKKGKNVELPTVLTKNAITSGDVSVTIEK

SEQ ID NO: 94 - DNA, 741 bp, Triticum aestivum
  source 1..741: mol_type = unassigned DNA
atggtttccgcccaagtggcccgcaacatcgtcggcatcataggcaatgtcatctccttcggcctcttcctctcccctgtgccgacgttctggcggatctacaaggccaaggacgtggaggagttcaagccggacccctacctggcgacgctcatgaactgcctgctctggttcttttacgggctccccatcgtccaccccaacagcaccctcgtcctcaccatcaacggcatcggcctcgtcattgagggcgcctacatcatcatcttcatcatctacgcggccaagaacacaaggtggaagatgctcggcgtgctcgccctcgaggcggcgttcatggctgtcgtggtggccggcgtgctcctcggtgcccacacccatgagaagcgctccatgatcgtaggcatcctctgcgtcatcttcggctccatcatgtacgcctccccgctcaccatcatgggtaaagtgatcaggaccaagagtgtggagtacatgccattcttcctgtcgctggtgaacttcctcaatggctgctgctggacgggctatgcgctcatcaagtttgacatctacatcacgatccccaatgccctcggtacaatcttcggcctcatccagctgatcctgtacttttactactacagattgacccccaagaaaggcaaaaatgtcgaactgcccactgtcctcaccaaaaacgccattaccagcggcgacgtctccgtcaccatcgaaaaataa

SEQ ID NO: 95 - DNA, 4241 bp, Triticum aestivum
  source 1..4241: mol_type = unassigned DNA
gctccaccgaagctccgtccaagacgaagccgctccacctcctgcctctatgctccagcgttgctccataaaagatgctcccaagaaagaaacgacagcgtagtaccgtcattgtccgatctggaagaccaaaacctaggtttctcccaaagcagcatgagtgggtcgacaacagttacacaacgatgtcttcatcaaggtaacggcgcaaaaacgccaccatcgtccgctaacggctcggttttcaccggcaactatgtcttcccgacttgcagccggagccagaggacggatcttcagatctgaccatccagcgtcaggctgaccacctccaacagaggagatggccaccaccgccggctgcaccggccagatcatatctgacccaaggcgccgccgaccagaccaccatggcctccacgcctttgccgccgatccgacgcccgatggcgcgccgaccgcagccgccgcccttccaggtacaggcccgtgccgtgcctgcatctgccgctgcccgaggcagggccgaccaccgcgccgccgcagcgtaaagtggactggcggccgagctcgcaaatggagaacaagagttgggttttttttataataaaaattgttgaggggggacgttagggcatttgatcgatgggggaacgaggtaaccaaacgaaacaaaacgacctgcgtactccactttaatagtagaaagacaattgtatattaatccctccgtcgcatactgtaaaaaacactcttatattagatcgagggagtagagcacgaacaacacttcacggcctccggtaacacgcgtgttgggcttccggagtcgttgggacgactgggtcggtcttgggctttgcagtgtccttgggtgacgccggctgggtcggtgttggtccgtgacagctttgcgctcagggttgtccttatttgttttgcgtacgactgtaccacgactgttacgtgggagaggagcgtgatcctttttccttcgtctggaaaaaggacgcgggcgaggaagaaattgacacggccggccgttggatgggagcacggccggagaaggagttggttgaggactgcactcaaatcaaaccgtttaacctacccttaaccatatccacatcggatataacttggggaaggcgacggggaaccccctactatataagctcggccacccacgccccaaacaaatcacaaccaaccttcctcaagtcgtttgctcccccgagcaatcgagttgtgtttccggcgagcgatcgatctagctgagcatcatggtttccgcccaagtggcccgcaacatcgtcggcatcataggcaatgtcatctccttcggcctcttcctctcccctgtgtaagcccactcctcctcctctcgcctagtctgtatctgtatgtatacatatatgaaaggtggttgctagggcatgaatctgaggctcgttttctacttgtacctacgtacgcaggccgacgttctggcggatctacaaggccaaggacgtggaggagttcaagccggacccctacctggcgacgctcatgaactgcctgctctggttcttttacgggctccccatcgtccaccccaacagcaccctcgtcctcaccatcaacggcatcggcctcgtcattgagggcgcctacatcatcatcttcatcatctacgcggccaagaacacaagggtacgtacgtgcaaccctccgaatgcctcctcatccgtcccactgtctcttttcggctttagtttctgtacagaagatcctccagcccctaacccacgccatgtgcatgtgctctgctgtgtgtgcagtggaagatgctcggcgtgctcgccctcgaggcggcgttcatggctgtcgtggtggccggcgtgctcctcggtgcccacacccatgagaagcgctccatgatcgtaggcatcctctgcgtcatcttcggctccatcatgtacgcctccccgctcaccatcatggtacgtacaccaccccaacttaagggtcgtcgacccgtgagctttgataaccgctttaacttgttagttctggtggctaattaattaatctgcgttgtgcacgtgtggtgtggtaattatgcgctttcaagaaaaaaatacctgcctataattatttttaaagttctagcagatgcttttgacagaccttaatttgttaagtagtacaccttgtttgttgttgattctgcttgaaaatctatgtccatctaaaagatgtacccacctttcattttttaacgttggtgccaaaaccctgttaaaaaaagtccgaactgagttgttcacctctcacgcacccaagttcttctgcagggtgaattactagctcaggctaattgtttttgccaacttaggagtgtactaatactaatattactcaaaaatttaagatgaaagtagtaatattgtactgctatttgcagggtaaagtgatcaggaccaagagtgtggagtacatgccattcttcctgtcgctggtgaacttcctcaatggctgctgctggacgggctatgcgctcatcaagtttgacatctacatcacggtatgtacatacacatacacattggaaataagaagtcgcaaacccagccagacattcactcaagaactcctcagcgtggattgatctaactgttatgtcctctttaaattccttgcagatccccaatgccctcggtacaatcttcggcctcatccagctgatcctgtacttttactactacagattgacccccaagaaaggcaaaaatgtcgaactgcccactgtcctcaccaaaaacgccattaccagcggcgacgtctccgtcaccatcgaaaaataaagttggcttcgttttttagccctagtgattttgagtagttaataccggatgatacttcaacaagttgatgttaattagtactacttcttgttagctattagagtctgagatcgcctttagtttcatgaaccattgtcgtctgtccgagactaatagtgttatttcaagtgtatataaataccaatccagctgagttatcccagagatgtattatgacaccatgtttgctttcctgttttcaatctgctcttacgttttgataccattgattttttaattacagtgtgagatggctttgttaaattaaattaaattattcaatatccatgatgtgtttgtattatgtttcgggcaaggacctctttcgttttctgtacaaaaacacccaaagggcatcttattggtgatgcaacttgaacccggtgtaagagaaaaggagacagacttaacctaattacgggtttggttggatggctcctgctcttttcccgtgacgctgccttgttaccacatggacaggcaacgagcagctctgcagcttggtcaagtatgacgctttgagtcgtccctgctagagatatttttctgaatcttgtaatatgttaattgtttgtcatatatatttcaaagtagtgtgtttgatcgcatggtgtctactgtatatatagacacacttctttgtcaagaaaaatgagttgagtataggaagagctccgctcaaattagatagcccaccaacttgtggctataactagtaagactccagctctttcccacaaattcctattaagggaaataaagataacatccaacttgaagcaacatccaaactagcagcccaggctagctaaacacatcaactttagactacatactgtgttttaatatccaagagcaaggtttttttatcaatttattttctttgtatttgaatgatctcgagtcatctagcgataattactatatgaatcttgactacatactgtatttattaatatccaagagcaaggtacaaataaaacagactggaaattatataataaagtgtcagtatgctttacgcatattaattcttatgttatgtgaattgtttgaaattttgggccacattttggtttccgcccgaggccccaaatttctggagatggccctgctaaacagccgctgaatgcagccgaagaccgatagccttaagtgagttagtttctggccccgcacagctccaaacacttcatttgccacctgttcaaagagcattactccccactgcaacagattttgtttacctcatttctctataaaggaaacgaatagtgaatccaatatccaattagtttgatcacaacaacacatcatccatcggttttttctgtgtgtgcctgaaacaccatc

SEQ ID NO: 96 - protein, 246 aa, Triticum aestivum
MVSADVARNIVGIIGNVISFGLFLSPVPTFWRIYKAKDVEEFKPDPYLATLMNCLLWFFYGLPIVHPNSTLVLTINGIGLVIEGAYIIIFTIYAAKNTRRKMLGVLALEAAFMAAVVAGVLLGAHTHEKRSMIVGILCVIFGSIMYASPLTIMGKVIRTKSVEYMPFFLSLVNFLNGCCWTAYALIKFDIYITIPNALGTIFGLIQLILYFYYYRSTPKKGKNVELPTVLTKNAVTSGTVSVTIEK

SEQ ID NO: 97 - DNA, 741 bp, Triticum aestivum
  source 1..741: mol_type = unassigned DNA
atggtttccgccgacgtggcccgcaacattgtcggcatcatcggcaatgtcatctccttcggtctcttcctctcccctgtgccgacgttctggcggatctacaaggccaaggacgtggaggagttcaaaccggacccctacctggcaacgctcatgaactgcctgctctggttcttttacgggctccccatcgtccaccccaacagcaccctcgtcctcaccatcaacggcatcggcctcgtcattgagggcgcctacatcatcatctttactatctacgcggccaagaacacaaggcggaagatgctcggcgtgctcgccctcgaggcggcgttcatggctgccgtcgtggccggcgtgctccttggtgcccacacccatgagaagcgctccatgatcgtaggcatcctctgcgtcatcttcggctccatcatgtacgcctccccgctcaccatcatgggtaaagtgatcaggaccaagagtgtggagtacatgccattcttcctgtcgctggtgaacttcctcaatggctgctgctggacggcctatgcgcttatcaagtttgacatctacatcacgatccccaatgccctcggtacaatctttggtctcatccagctgatcctgtacttctactactacagatcgacccccaagaagggcaagaatgttgaactgcccactgtcctcaccaaaaacgccgttaccagcggcaccgtctccgtcaccatagagaaataa

SEQ ID NO: 98 - DNA, 33298 bp, Triticum aestivum
  misc_difference 3269..6031: note = a, c, t, g, unknown or other
  misc_difference 12402..13661: note = a, c, t, g, unknown or other
  misc_difference 13978..14002: note = a, c, t, g, unknown or other
  misc_difference 14328: note = a, c, t, g, unknown or other
  misc_difference 15893: note = a, c, t, g, unknown or other
  misc_difference 16412: note = a, c, t, g, unknown or other
  misc_difference 16826..16850: note = a, c, t, g, unknown or other
  misc_difference 17707..17727: note = a, c, t, g, unknown or other
  misc_difference 18255..19803: note = a, c, t, g, unknown or other
  misc_difference 20136..20143: note = a, c, t, g, unknown or other
  misc_difference 25418: note = a, c, t, g, unknown or other
  misc_difference 27877: note = a, c, t, g, unknown or other
  misc_difference 28617..29205: note = a, c, t, g, unknown or other
  source 1..33298: mol_type = unassigned DNA
cagggttgtccttgtttgttttgcgtaagactatatggggtttatccgagtataggagtattgttacgtgggagaggagctcctagctgcgtgatccttttttggctggaaaaaaggacgcgggcgaggaagaaattgacacggccggctgttggatgggagcacggccggctgttggagttggatgaggactgcactcaagtcaaaccgcttaacctacccttaaccatatctacatcggatataacttggggaaagcgacggggaactccctactatataagctcggccacccacgccccaaacaaatcacaaccaaccttccccaagtcgttagttcccccgagcaatcgagttgtgttcccagcgatcgatcgatctaggtgagcatcatggtttccgccgacgtggcccgcaacattgtcggcatcatcggcaatgtcatctccttcggtctcttcctctcccctgtgtaagccaactcctcctcctctcgtctagtctgtatgtatacatatatgaaaggtggttgctagggcacgaatctgaggctcgttttctaattgtacgtatgtacgcaggccgacgttctggcggatctacaaggccaaggacgtggaggagttcaaaccggacccctacctggcaacgctcatgaactgcctgctctggttcttttacgggctccccatcgtccaccccaacagcaccctcgtcctcaccatcaacggcatcggcctcgtcattgagggcgcctacatcatcatctttactatctacgcggccaagaacacaagggtacgtacgctgcaaccctcctaatgcctcctcatacggcctacagtctcttttcggctttagtttctgtacagaagatcctccagcccctaacccaagccatgtgcatgtgctctgttgtgtgtgcagcggaagatgctcggcgtgctcgccctcgaggcggcgttcatggctgccgtcgtggccggcgtgctccttggtgcccacacccatgagaagcgctccatgatcgtaggcatcctctgcgtcatcttcggctccatcatgtacgcctccccgctcaccatcatggtacgtacaccaccccaacttaagggtcgtcgacctgtgatctttgataaccctttaacttgttagttcaggtggctaattaattaatctgcgttgtgcatgtatggtgtggtaatgatgcgttttcaagaaaaatacctgcctataatttatttttaaagttctagtggatgcttttgacagaccttaatttgttaagcagtacaccttgtttgttgttgattatgtccatctaaaagttgcacccacctttcatttttttaatgttcgtgccaaaaccctgttaaaaaaagtccgaattgacttttcacctctcacacacccaagttcttgtacaatatgctacatgatatatttttaatcaaaaaagcctacggtttatttctatccgaaaggtaaacttcctttagagggtgaaatactagctcaggctaattgtaaattacggatgcttttgccaacttacaagtgtattaatactaatataactcaaaatttaagatgaaagtagtaatattgtactgcctatttgcagggtaaagtgatcaggaccaaaagtgtggagtacatgccattcttcctgtccctggtgaacttcctcaatggctgctgctggatgggctatgcgctcattaagtttgacatctacatcacggtatgtacatacacatacacattggaaataagaagtcgcaaacccagccagacatacaatcaagaactcctcagcgcggattgatctaactgttatgtcctctataaattctgtgcagatccccaatgccctcggtacaatcttcggcctcatccagctgatcttgtacttttactactacagatcgacccccaagaagggcaaaaacgttgaattgcccactgtcctcaccaaaaatgccgttaccagcggcaacgtctccgtcaccatcgaaaaataaacttggcttcgttttttagccctaatgattttgagtagttaacaccggatgatacttcaacaagttgatgttaattagtactactttttgtttgctagtagagtctgagatcgccattaatttcgtgaaccattgtcgtctgtccgagactactattgcaaattacaagtgtatataaataccaatcgagctgagttatcccagagatatattatgacaccatgtatgcttgcctgttttcaatctgctcttatgtgatgatacgattgatgttttaattacagcgtgcaatggctttgttaaattaaattattcaatatccatgatgtgttggtattatgtttcgggcaaggacacagacttaacctaattaccggtttggttggatggctcctgctcttttcccgtgacgctgccttgttaccacatcgacagggaacgagcagctctgttggtcaagtatgaggctttgagtccctgctagagatatgtttctaaactaagcgagagcgcaaagctcttattctacgcgccggtcgctaaatcagcgcaatcctcgtccccgctaattgtttgagagtaaacagaaatagaaaatatggtaatgcatttaatttatgttaccacttcacgcgccccaccaccgtcccgtggctccgtgccacccgctaatcataatggtaaaaccggatgcaggaaaaagtaatggaattaaaatggttactgctagtcacgcacaacactccgctcggcaaactagactttattctattccagctaaaatagctactagaatagtaatccccggcgttcttctaatcatagtaacaatcattgtaaaatatagtaaaagaattaatttggttaccattgcacccaccacctccggccttgcgccatatgttgcatagtaacattaggtgaaaaaaatagtaaacatactaattaggttacacctgcacagactacatctccttcatgcatcacaatttaagcacatagtaaatgaacgttcaaacaatagtaatggaattactgttgcactcacaacttccatggcacgtaccataattagggcacatagttactactacgctcaaccacatttcccctggtagtaactaacactagaaaatatagtaactgacttcgttactactatcacaccacaaggcaaaacaacatgtattactatagcattttaaaagaaaaaacatgtattactatagaatgcacatactttannnnnnnnnnnnnnnnnnnnnnnnnnnnnnnnnnnnnnnnnnnnnnnnnnnnnnnnnnnnnnnnnnnnnnnnnnnnnnnnnnnnnnnnnnnnnnnnnnnnnnnnnnnnnnnnnnnnnnnnnnnnnnnnnnnnnnnnnnnnnnnnnnnnnnnnnnnnnnnnnnnnnnnnnnnnnnnnnnnnnnnnnnnnnnnnnnnnnnnnnnnnnnnnnnnnnnnnnnnnnnnnnnnnnnnnnnnnnnnnnnnnnnnnnnnnnnnnnnnnnnnnnnnnnnnnnnnnnnnnnnnnnnnnnnnnnnnnnnnnnnnnnnnnnnnnnnnnnnnnnnnnnnnnnnnnnnnnnnnnnnnnnnnnnnnnnnnnnnnnnnnnnnnnnnnnnnnnnnnnnnnnnnnnnnnnnnnnnnnnnnnnnnnnnnnnnnnnnnnnnnnnnnnnnnnnnnnnnnnnnnnnnnnnnnnnnnnnnnnnnnnnnnnnnnnnnnnnnnnnnnnnnnnnnnnnnnnnnnnnnnnnnnnnnnnnnnnnnnnnnnnnnnnnnnnnnnnnnnnnnnnnnnnnnnnnnnnnnnnnnnnnnnnnnnnnnnnnnnnnnnnnnnnnnnnnnnnnnnnnnnnnnnnnnnnnnnnnnnnnnnnnnnnnnnnnnnnnnnnnnnnnnnnnnnnnnnnnnnnnnnnnnnnnnnnnnnnnnnnnnnnnnnnnnnnnnnnnnnnnnnnnnnnnnnnnnnnnnnnnnnnnnnnnnnnnnnnnnnnnnnnnnnnnnnnnnnnnnnnnnnnnnnnnnnnnnnnnnnnnnnnnnnnnnnnnnnnnnnnnnnnnnnnnnnnnnnnnnnnnnnnnnnnnnnnnnnnnnnnnnnnnnnnnnnnnnnnnnnnnnnnnnnnnnnnnnnnnnnnnnnnnnnnnnnnnnnnnnnnnnnnnnnnnnnnnnnnnnnnnnnnnnnnnnnnnnnnnnnnnnnnnnnnnnnnnnnnnnnnnnnnnnnnnnnnnnnnnnnnnnnnnnnnnnnnnnnnnnnnnnnnnnnnnnnnnnnnnnnnnnnnnnnnnnnnnnnnnnnnnnnnnnnnnnnnnnnnnnnnnnnnnnnnnnnnnnnnnnnnnnnnnnnnnnnnnnnnnnnnnnnnnnnnnnnnnnnnnnnnnnnnnnnnnnnnnnnnnnnnnnnnnnnnnnnnnnnnnnnnnnnnnnnnnnnnnnnnnnnnnnnnnnnnnnnnnnnnnnnnnnnnnnnnnnnnnnnnnnnnnnnnnnnnnnnnnnnnnnnnnnnnnnnnnnnnnnnnnnnnnnnnnnnnnnnnnnnnnnnnnnnnnnnnnnnnnnnnnnnnnnnnnnnnnnnnnnnnnnnnnnnnnnnnnnnnnnnnnnnnnnnnnnnnnnnnnnnnnnnnnnnnnnnnnnnnnnnnnnnnnnnnnnnnnnnnnnnnnnnnnnnnnnnnnnnnnnnnnnnnnnnnnnnnnnnnnnnnnnnnnnnnnnnnnnnnnnnnnnnnnnnnnnnnnnnnnnnnnnnnnnnnnnnnnnnnnnnnnnnnnnnnnnnnnnnnnnnnnnnnnnnnnnnnnnnnnnnnnnnnnnnnnnnnnnnnnnnnnnnnnnnnnnnnnnnnnnnnnnnnnnnnnnnnnnnnnnnnnnnnnnnnnnnnnnnnnnnnnnnnnnnnnnnnnnnnnnnnnnnnnnnnnnnnnnnnnnnnnnnnnnnnnnnnnnnnnnnnnnnnnnnnnnnnnnnnnnnnnnnnnnnnnnnnnnnnnnnnnnnnnnnnnnnnnnnnnnnnnnnnnnnnnnnnnnnnnnnnnnnnnnnnnnnnnnnnnnnnnnnnnnnnnnnnnnnnnnnnnnnnnnnnnnnnnnnnnnnnnnnnnnnnnnnnnnnnnnnnnnnnnnnnnnnnnnnnnnnnnnnnnnnnnnnnnnnnnnnnnnnnnnnnnnnnnnnnnnnnnnnnnnnnnnnnnnnnnnnnnnnnnnnnnnnnnnnnnnnnnnnnnnnnnnnnnnnnnnnnnnnnnnnnnnnnnnnnnnnnnnnnnnnnnnnnnnnnnnnnnnnnnnnnnnnnnnnnnnnnnnnnnnnnnnnnnnnnnnnnnnnnnnnnnnnnnnnnnnnnnnnnnnnnnnnnnnnnnnnnnnnnnnnnnnnnnnnnnnnnnnnnnnnnnnnnnnnnnnnnnnnnnnnnnnnnnnnnnnnnnnnnnnnnnnnnnnnnnnnnnnnnnnnnnnnnnnnnnnnnnnnnnnnnnnnnnnnnnnnnnnnnnnnnnnnnnnnnnnnnnnnnnnnnnnnnnnnnnnnnnnnnnnnnnnnnnnnnnnnnnnnnnnnnnnnnnnnnnnnnnnnnnnnnnnnnnnnnnnnnnnnnnnnnnnnnnnnnnnnnnnnnnnnnnnnnnnnnnnnnnnnnnnnnnnnnnnnnnnnnnnnnnnnnnnnnnnnnnnnnnnnnnnnnnnnnnnnnnnnnnnnnnnnnnnnnnnnnnnnnnnnnnnnnnnnnnnnnnnnnnnnnnnnnnnnnnnnnnnnnnnnnnnnnnnnnnnnnnnnnnnnnnnnnnnnnnnnnnnnnnnnnnnnnnnnnnnnnnnnnnnnnnnnnnnnnnnnnnnnnnnnnnnnnnnnnnnnnnnnnnnnnnnnnnnnnnnnnnnnnnnnnnnnnnnnnnnnnnnnnnnnnnnnnnnnnnnnnnnnnnnnnnnnnnnnnnnnnnnnnnnnnnnnnnnnnnnnnnnnnnnnnnnnnnnnnnnnnnnnnnnnnnnnnnnnnnnnnnnnnnnnnnnnnnnnnnnnnnnnnnnnnnnnnnnnnnnnnnnnnnnnnnnnnnnnnnnnnnnnnnnnnnnnnatcaaagtagtgtgtttgatcgcatggtgtctactgtatatatagacacacttctttgtcaagaaaaatgagttgactataggaagagctacgctccaattacatagcacaccaacttgtggctctaactagtaagactccagcccattctcacaaatttctattaagggaaataaaaataacttccaacttgaagcaacatccaaacttgcagcccatgctagctaaacacatcaactttagactacatgttgtgttttaatatccaagagcaagatgttttttatcaatttattttctttgtatttgaatgatctcgagtcatctagcgatcattactatatgaatctagtaaggttctgtttgatcaatgatcactttataatttgttaggttttgttcctggatcatcattatgtctactagaattaggaaacacgattctagtgctgccaaacaaagactggatcttgaggcccgaactcaaacgagtgccctcaatagatatttagtgagcctgccaacttgatcctgaaaatcaaactgcagaggttaatgttgacgatggtggtgatgataatacaatggtggttgtggaacatgatgcagaaattgatgtcttggagatatgatatagtacgaagatatgattgaagattatattccaagaaatactagacggatggtcctttttggtagaacatgaggttcgttcattgctttgctatcacattgccatttttgcataatatctgatatatggttaaatgagttacaaataaaacagactggaaattatataataaagtgacagtatgctttacgcatattaattcttatgttatgtgaattgttcgaaattttgggccacattttggtttcggcccgaggccccaaatttcgggagatggccctgctaaacagccgctgaatgcagccgaagaccattagccttaagtgagttagtttctggccccgcacagctccaaacacttcatttaccacctgttcaaagagccttactccctactgcaacaggttttttttacctcatttctctacaaaggaaacgaatagtgaatccaatatccaaatagtttgatcacaacaacacatcatccagcagttttttctgtgtgtgcctgaaacaccatcatttcgtgtgtcccagataatccgcggaagtgcagcaaccacaactagcaccaatttttcggtcactccagcaaactggattatgcaggattccagcagtcattaaatatccatggaaataagaataaaggtgcattttggcacattccatataaatcgcacgagaggagtagaggaacagatgatcaattgtatgaggccaaggaggttggcaattgcacatgggttgctaatcctggcgccaaagtagtcgagtactgcgtcctatacgaatggacactaagattcatgtcttctactgtcctccaggtgtggactttgacgaccatggacagaactaatggttctatgatgggattatacagggccaagaaaatacattagcatggtagattggcgattctctacaaaggtacatgaacttggatggtttgcttacagaaacaatgatgtttatgatggttgctgggtttacgtcacatgcaaagtaactcgatggggatgatattgtgctggctcctgtagtggagccctgctccggtgctcccccctaacctaattttgaaggggtatttttgtccccgcgagtttgtttttttcctggcccgctgtagcccagatccaagccctgtctagccttgccaagccctgtatagcccagaccgtctatgtacagtaccctggtccgaaaaaaaaaccacgaccccacgagcacgtaggacctgccggatccaatcattcgcgcagctccatcaatctcgcgggcattcacgcagctccatacttcacgcggtagatctccagcggcgcgcggctacctcgtcaccggcgatctcgtcggacagcgggcgcggcaacgtcgtgaatctccagcgctcccaggtaccacatcccgcatccccccgcacccctctagtctcgctcgcggcaacatctaacgaactgccgctatcagagatatagcggggcgggtaacctacctacccgccggcgcatgcgatcgtggatcttgttccggtagtgctgctcctcgtgatttgggtttcttcagtggagggttcgcgtagcgttggttaccatcggttgtgtacactaggaccatcgttatttgatgtggctgctaacctaggtatccggcggcagaggtaatcacagatctagctaggttttgtagtgccgctcctcgcgattgaaagtgatcacgacgtgtgtcgtggccatcttcctgacttggtttggcagatctgaacggcctcggttggggttgtttacataacatccgtgatcgtgagctatgtgttgatatttcatcattgataatgttttcatcatttgttgtaggaaatggcggacgaggagttaactgatatgatggtagacacggagtttggagaactgatgaagactggatagaagactggtcagatgatgaaaattcagatcttggagttcagtcagagaatgggaacaaatgggaagattttaatgtgagtggcattaccatgttgtaattttttggtgccatccaacaacattatatttttgtgttgaaaatttgtagatggatgagcatgatgatggtcaggaaaacaattcagagctctcaaatgaagattacattagtcaggtacgtaagtgaaaaaaattattggcatgcaaattgaattcattctgaaatattatatgataagtaattatgtatttgtgttgtatttttcagttcatttccgaatggcataatgcgtatgactattacggtgaatccaacacggagacataccttaacgacgaatcatcagatgcacctgattctagggattcgcagtcatcggtcatcatgagtgaggtatttgtgtaatcaatgttctatgaaagtaatgttaaaccatacaaaacattttttatggctatggtttgattgtgtaggtgacagaagatggcggggtaatgaatgtccaagatactgccagtgcagatgataagagggatatgttcatgcagataatggacatgacttttataactcacgatgctgcgtatgatttctacaacagctatgctagaggtaatggtttcagcgttagaaagaataacgtcaggtataccaaaaccgaggcacatcttatgcgttataggaagtttgtttgttccagacaagggaaacgtgacaacaagttgctaacagaggaaggacacagccgtaggctcagagccgagacacgctgcttttgtgaagcacacctgaccgtcaagcttgaccaaaagcgtggggtttggtatgttcaaagttttgaggaccggacgaggtaccttttctttggtcccacagacaaatcaaagagtaccagaagcatgagataatgttcatgggagctgcagggattagaattcatgacctgatggattccttcatcagcaaacatgtatggtatgccggtgttggttttaccaggcgtgaaatatacaacctttgcgccaacgtcatcgttaacttttacggacacacttcctccagagagaatgctctctacccagcgacaccatttttgtgaaaaccccttcatgtgcaaggtttgcaacaggaagggccacttaactttatcgtaggctttctcaaaatcaattttaagaatgaaaccgttcaactttttctggtgcagtttatgtatagttttgtgcagggccactccatctaatatgttgcagccttgcataaatgttgtttgagtggattttacgacatggtcagctacaccgttcaaccgattagtcgctaccttcgtaattttttttaaactttcagagggcaaaccggtcaatattgatgaatacgactagcctccttaatcttaggcaataggataatttccccaaagtttaaacaagaaatatcaaggtcctcggaatgcagttggttaaacaactgaaccaaatctgccttaatcacgtcccaaaagcattgatagaactctgcggaaaaccatctggtcccggcaccttgttgtgttccatctgaaacaccacagttcgaatttcctccttagaaaatggagaggttaggaattcattttcctcttccgtaacttgagtaatgtcatgagtaacggatttgtccagctgaaaattagtttcagctgatggcccaaaaaggtctttgtaaaatttagtgataaaatttctaaatggtacgtccccctctattcagccttcctcccggtcaagggcgaatatacacttccttctatgtctgccattggctagcatttgaaagtatttcgtattatcatcaccttgcaccagcgaatccggcttgctacgttggtaccagttaatctcttcctcacatagtaggcgggcaatctgctcgttaagattgcttgtttgctcaatctcaacagcagatagaggcctcacctccgctattttatcaagggtatcaactaaggtagacaatcgtagttttttctttttgtagatgccagcagtgtgctcggcccatcctcgaaggaatcgatgcaaggcgcggattcgattattccatcgtttaattggtgtgttaccgcgaggctggcgcgcccacaccttgttaaccagctcatgaaatccctctctagtgagccatcccagttcaaatttaaacttgtgacggttagaccttggggttggttgtgcaaaatcggttagcaacggagcgtgatccgataaggcctcgattctttctagcgcccgaacaaaggctaggggatatttatattcccagtcggtggtaattagcacccggaccagttttttaaaggttggcaccaatcggttattggcccaggtatactgacgaccagacatcatgatctccttcagatctagtttgtcaataacaatattaaagagggaaggccacctagtgccaaatcgatcattgtttttttactgctgatatcgaaggatattaaaatcccccccccccaacgattaacatgggatggggattgtctcaacaggtattaaccagttcttttagaaatgcagacttaaactcctcttgagcggcgccatatacagccactagactccagatgaagttgtcggacttatttctaaggtggaacttgatatgatactccccctttgacgtggacaatagttgtaagtatgtagagttaatacctaacaatattcccggggacctcccggccggtggtaagacgggccattcgtaatcaaaaccacatgaaaagtggtccagatcacttgttggaaaatctcgtttagccgactcagtgatagccacaaagtccaacgtatgattcttcacacaatcggcaatttgtttgtgtttagccaagtcaccaagacctctgctattccagaacatgcctctcatgatgaaccaacattatgtttagagacctttggcttcttagaagagctccctcttttctttgctgagttagacttgttcttgcgcaccgacgcggcaagctcaaaaagcgtagtgtcgcgtacaatatcgtcaaggtctacttcagtcgtgtctttaaccaaatgagagagaagcttgccttcatgattggcatcaacatccaaatcctcctcatctgacacgagagggtcgacaaaactcgataactttggagcaaccataggccggtcaaacccaagttgttttagagccttgaccaaaaaatctatctcattctcattactgttggaaatatgccctagaggcaataataaataagttattattatatttctttgttcatgataatagtcttttattcatgctataactgtattattcggaaatcataatacacgtgtgaatacatagaccacaatatgtccctagtgagcctctagttgactagctcgttgtgatcaacagatggtcatggtttcctggctatggacattggatgtcgttgataacgggatcacatcattaggagaatgatgtgatggacaagacccaatcctaagcctagcacaaagattatgtagttcgtatgctagagttttgccaatgtcaagtatctcttcctttgaccatgagagcgtgtaactcctggataccgtaggagtgctttgggtgtatcaaacgtcacaacgtaactgggtgactataaaggtgcactacaggtatcttcgaaagtatctattgttttatgcggatcgagactgggatttgtcactccgtgtaaacggagaggtatctnnnnnnnnnnnnnnnnnnnnnnnnnnnnnnnnnnnnnnnnnnnnnnnnnnnnnnnnnnnnnnnnnnnnnnnnnnnnnnnnnnnnnnnnnnnnnnnnnnnnnnnnnnnnnnnnnnnnnnnnnnnnnnnnnnnnnnnnnnnnnnnnnnnnnnnnnnnnnnnnnnnnnnnnnnnnnnnnnnnnnnnnnnnnnnnnnnnnnnnnnnnnnnnnnnnnnnnnnnnnnnnnnnnnnnnnnnnnnnnnnnnnnnnnnnnnnnnnnnnnnnnnnnnnnnnnnnnnnnnnnnnnnnnnnnnnnnnnnnnnnnnnnnnnnnnnnnnnnnnnnnnnnnnnnnnnnnnnnnnnnnnnnnnnnnnnnnnnnnnnnnnnnnnnnnnnnnnnnnnnnnnnnnnnnnnnnnnnnnnnnnnnnnnnnnnnnnnnnnnnnnnnnnnnnnnnnnnnnnnnnnnnnnnnnnnnnnnnnnnnnnnnnnnnnnnnnnnnnnnnnnnnnnnnnnnnnnnnnnnnnnnnnnnnnnnnnnnnnnnnnnnnnnnnnnnnnnnnnnnnnnnnnnnnnnnnnnnnnnnnnnnnnnnnnnnnnnnnnnnnnnnnnnnnnnnnnnnnnnnnnnnnnnnnnnnnnnnnnnnnnnnnnnnnnnnnnnnnnnnnnnnnnnnnnnnnnnnnnnnnnnnnnnnnnnnnnnnnnnnnnnnnnnnnnnnnnnnnnnnnnnnnnnnnnnnnnnnnnnnnnnnnnnnnnnnnnnnnnnnnnnnnnnnnnnnnnnnnnnnnnnnnnnnnnnnnnnnnnnnnnnnnnnnnnnnnnnnnnnnnnnnnnnnnnnnnnnnnnnnnnnnnnnnnnnnnnnnnnnnnnnnnnnnnnnnnnnnnnnnnnnnnnnnnnnnnnnnnnnnnnnnnnnnnnnnnnnnnnnnnnnnnnnnnnnnnnnnnnnnnnnnnnnnnnnnnnnnnnnnnnnnnnnnnnnnnnnnnnnnnnnnnnnnnnnnnnnnnnnnnnnnnnnnnnnnnnnnnnnnnnnnnnnnnnnnnnnnnnnnnnnnnnnnnnnnnnnnnnnnnnnnnnnnnnnnnnnnnnnnnnnnnnnnnnnnnnnnnnnnnnnnnnnnnnnnnnnnnnnnnnnnnnnnnnnnnnnnnnnnnnnnnnnnnnnnnnnnnnnnnnnnnnnnnnnnnnnnnnnnnnnnnnnnnnnnnnnnnnnnnnnnnnnnnnnnnnnnnnnnnnnnnnnnnnnnnnnnnnnnnnnnnnnnnnnnnnnnnnnnnnnnnnnnnnnnnnnnnnnnncaaccggcaggagccataggagttgtctttatttattgtatgacctgcgtgtcattgaagaacgccatgtaaactactttactttattgctaaacgcgttagtcatagaagtagaaatagtcattggcgtgacaacttcatgaagacacgatgatggagatcatgatgatggagatcatggtgtcatgccggtgacaagatgatcatggagccccgaagatggagatcaatggagctatatgatattggccatatcatgtcacaactatataattgcatgtgatgtttattatgtttatgcatcttgtttacttagnnnnnnnnnnnnnnnnnnnnnnnnnagttcgtcgcttctaagcaccacgtgatgatcgggtgtgatggattcttacgttcacatacaacgggtgtaagaaagttttacacagcgaaaacacttagggttaacttgacgagcctagcatgtgcaaacatggcctcggaacacggagaccgaaaggtcgagcatgagtcgtatagtagatacgatcaacatgaagatgttcaccgatgatgactagtccgtctcacgtgatgatcggacacggcctagttgactcggatcatgtaatcacttagatgaccagagggatgtctatctaagtgggagttcataagatgaacttantatctaagtgggagttcataagatgaacttaattatcctgaacatagtcaaaagaccttttgcaaattatgtcgtaagctcgcgctttagttccactgtttagatatgttcctagagaaaatatagtttaaagttgatagtagcgattatgcgatcagtagaaagcctatgtccttaatgcaccgctcagtgtgctgaaccccaacgtcgtttgtcgatgttgcgaacatcggacatacacgttttgataactacgtgatagttcaattaaatggtttaagtagaggcaccaaagacgttttcgaaacgtcgcggaacatatgagatgtttcgagggctgaaattggggttttcaggctcgtgcccacgtcaagaggtataagacctccggcaattttcttagcctacaaactaagggagaaaagctcaatcgttgagcttgtgctcagattttctgagtgcaacaatcacttgaatcgagtgggagttgatcttccaaatgagatagtgatgtttctccaaagtcattgccaccaagctgctagagcttcgtgatgaactataacatagcagggatagatatgatgatccttgaaatattcgtgatgtttgacaccgcgaaagtagaaatcaagaaggagcatcaattgttgatggttggtgaaaccactagtttcaagaagggcaagggaacaaagggatacttcatgaaacagcaattcagctactgctctagtgaagaaacccaaggttgaacccaaacccgagactaagtgcttctgtaataaggggaacagccactggagcagaactaccctagatacttggtagatgagaaggctggcaaggttgatagaagtatattggatatacattatgctaatgtgtactttactagtactcccagtagcaccagggtataagataccggttcggttgctaagtgttagtaactcgaaataaagagctacggaataaacggagactagctaaaggtgagccgacgatatgtgttggaagcatttccaagtttgatgtgatcaaacatcgcacgctccctctaccatcaagattagtattaaacttgaataactgtcatttggtgcttgcgttgagcatagacatgattggattatgtctatcgcaatacggttattcatttaaggagaataatggttactctatttatttgaataaaaccttcaatggtcttgcacctaaaggaatggtttattgaatctcgatcgtagtgatacatattttcatgccaaaagacataagatagtaatgatagtaccacttacttgtggcactgccatgtaagtcataatggtataaaacacatgaagaagctccatgttgatagatctttggactcactcatttttgaaaagtttgagacatgcgaaccatgtctattggtgtatacgcatgaagaaactccatgcagatggatcgtttggactcacttgattttggatcacttgagatatgcaaatcataccacataggcaagatgactgaaaagcctcggtttcagtaaaatggaacaagatagcaacttntaccacataggcaagatgactgaaaagcctcggtttcagtaaaatggaacaagatagcaacttgttggaagcaacacattttgatgtgtgcagtccaatgagtgctgaggcaagcagtgaatatcgttatgttcttacttcatagatgatttgagtagatgttgagtatatttacttgatgaataacgagtctgaattattgaaaggttcaagtaatttcagtgtgaagttggaagatcgtcgtgataagaggatctatgatatgatcatagagatgaatatctgagtcacgagttttggcacacaattaagacattgcggaaattgtttcgcaattaataccgcctggaacaccatagtgtgatggtgtgtccgaacatcatagttgcaccctattggatatgatgcataccatgatgtctcttatcgaactgccacgatagtttatgggttaggcattaaagacaaccacattcactttaaatagggcaccacgtaattccgttgagacgacaccgnacgtaattccgttgagacgacaccgtttgaattatggtttagagaaacctaagttgtcgtttcttaaaggtttggggctgcgacgcttatgtgaaaaagtttcagcttgataagctcgaacccaaagcagacaaaatgcatcttcataggacacccaaaacagttgggtatacctcctgtctcagatccgaaagcaataagggattgtttctataatcaggtcctttctcgaggaaaagtttctctcgaaagaattgagtgggaggatggtggaaacttgatgaggttattgaaccgtctcttcaactagtgtgtggcagggcacaggaagttgttcctgtggcacctacaccaattgaagtggaagcttatgatattgatcatgaaacttcggatcaagtcactaccaaaccnnnnnnnnnnnnnnnnnnnnnnnnnctgtcttggaagtcatgttgctggacaacaatgaacctacgagctatggagaagcgatggtgggcccggattccgataaatggctcgaggccataaaatccgagaacggatccatggactttggtggagttgcccgatgatcggcaagccattaagataaatggatctttaagaagaagacggacgtggatggtaatgtcaccgtccatgaagctcgacttgtggcgaaaagtttttcacaagttcaaggagttgactacgatgagtttttctcatccgtagcgatgcttaaagtccgtcggattcttgttagcattagctgcatttatgaaatctggcagatggatgtcaagacaagtttccttaccagttttcgtaaggaaaggttgtatgcaatacaatcagaaaagttttgtcgatcctaaggatgctaaaaggtatgcatctcggagttggaatgtacgcatcctaaggatccagcgatccttctaaggactggagtaagcatctcggagttggaatgtacgctttgataagatgatcaaagattttgggtctatacaaagtttatgagaaacttggatttccaaagaagtgagtgggagcactatagaatttctgatgagtatatgttgttgacatattgttgatcagaattgacgtagaatttctggaaagcatatagggttattttgaaagtgtttttcaatggaaagcctggattaagctgcttgagcattgagcatcaagatctataaggatagatcaaaacgcttaatggtactttcaaatgagcacataccttgacatgatcttgaaggtgttcaagatggaccagtcaaagaaggagttcttgnnnnnnnnnnnnnnnnnnnnncagaatagagagaaaggacgaaggtcgtcccctatgcttaagacgtaggctcttcagtatgctatgctgtgtaccgcacctgaagtgtgccttgccatgagtcagttaaggggtacaagagtgatccatgaatggatcacaggacagcggtcaaagttatccttagtaactagtggactaaggaattttctcgattatggaggtggtaatagagttcgtcgtaaagggttatgtcgatgcaagcttgacacctatctggatagctctgagtagagagaccggatacatataatggagcaataatttagaatagctccaagtagaacaattatttggaatagctccaaatagagcgtggtagctgcatctaggagatgacatagagatttgtaaagcacacacggatctgaaaggttcagacccgttgactaaaacctctctcacaagcagaacatgaccaaaccccagatctcattgagtcttgatcacatgatgatgtgaactagtttagtgacactagtaaactcnnnnnnnnnnnnnnnnnnnnnnnnnnnnnnnnnnnnnnnnnnnnnnnnnnnnnnnnnnnnnnnnnnnnnnnnnnnnnnnnnnnnnnnnnnnnnnnnnnnnnnnnnnnnnnnnnnnnnnnnnnnnnnnnnnnnnnnnnnnnnnnnnnnnnnnnnnnnnnnnnnnnnnnnnnnnnnnnnnnnnnnnnnnnnnnnnnnnnnnnnnnnnnnnnnnnnnnnnnnnnnnnnnnnnnnnnnnnnnnnnnnnnnnnnnnnnnnnnnnnnnnnnnnnnnnnnnnnnnnnnnnnnnnnnnnnnnnnnnnnnnnnnnnnnnnnnnnnnnnnnnnnnnnnnnnnnnnnnnnnnnnnnnnnnnnnnnnnnnnnnnnnnnnnnnnnnnnnnnnnnnnnnnnnnnnnnnnnnnnnnnnnnnnnnnnnnnnnnnnnnnnnnnnnnnnnnnnnnnnnnnnnnnnnnnnnnnnnnnnnnnnnnnnnnnnnnnnnnnnnnnnnnnnnnnnnnnnnnnnnnnnnnnnnnnnnnnnnnnnnnnnnnnnnnnnnnnnnnnnnnnnnnnnnnnnnnnnnnnnnnnnnnnnnnnnnnnnnnnnnnnnnnnnnnnnnnnnnnnnnnnnnnnnnnnnnnnnnnnnnnnnnnnnnnnnnnnnnnnnnnnnnnnnnnnnnnnnnnnnnnnnnnnnnnnnnnnnnnnnnnnnnnnnnnnnnnnnnnnnnnnnnnnnnnnnnnnnnnnnnnnnnnnnnnnnnnnnnnnnnnnnnnnnnnnnnnnnnnnnnnnnnnnnnnnnnnnnnnnnnnnnnnnnnnnnnnnnnnnnnnnnnnnnnnnnnnnnnnnnnnnnnnnnnnnnnnnnnnnnnnnnnnnnnnnnnnnnnnnnnnnnnnnnnnnnnnnnnnnnnnnnnnnnnnnnnnnnnnnnnnnnnnnnnnnnnnnnnnnnnnnnnnnnnnnnnnnnnnnnnnnnnnnnnnnnnnnnnnnnnnnnnnnnnnnnnnnnnnnnnnnnnnnnnnnnnnnnnnnnnnnnnnnnnnnnnnnnnnnnnnnnnnnnnnnnnnnnnnnnnnnnnnnnnnnnnnnnnnnnnnnnnnnnnnnnnnnnnnnnnnnnnnnnnnnnnnnnnnnnnnnnnnnnnnnnnnnnnnnnnnnnnnnnnnnnnnnnnnnnnnnnnnnnnnnnnnnnnnnnnnnnnnnnnnnnnnnnnnnnnnnnnnnnnnnnnnnnnnnnnnnnnnnnnnnnnnnnnnnnnnnnnnnnnnnnnnnnnnnnnnnnnnnnnnnnnnnnnnnnnnnnnnnnnnnnnnnnnnnnnnnnnnnnnnnnnnnnnnnnnnnnnnnnnnnnnnnnnnnnnnnnnnnnnnnnnnnnnnnnnnnnnnnnnnnnnnnnnnnnnnnnnnnnnnnnnnnnnnnnnnnnnnnnnnnnnnnnnnnnnnnnnnnnnnnnnnnnnnnnnnnnnnnnnnnnnnnnnnnnnnnnnnnnnnnnnnnnnnnnnnnnnnnnnnnnnnnnnnnnnnnnnnnnnnnnnnnnnnnnnnnnnnnnnnnnnnnnnnnnnnnnnnnnnnnnnnnnnnnnnnnnnnnnnncctccgaggtgccttggggaggatggactcctccccccctcttggccgcacccctttcttggaggaaggggcaaggctgcgcctcccccctctcccttgcccctatatatagtggaggggagggagggtatctatacctgagcccttggcgcctccctccctcccgtgacacctcctcctctcccgtaggtgcttggtgaagccctgcaggattgccacgctcctccatcaccaccacgccgttgtgctgctgctggatggagtcttcctcaacctctccctctctccttgctggatcaaggcgtgggagacatcgtcgagctgtacgtgtgnnnnnnnncggaggtgctgtccgttcggcactagatcatcggtgatttgaatcacgacgagtacgactccatcaaccccgttcacttgaacgcttccgcttagcgatctacaagggtatgtagatgcactctccttatactcgtagctggtttctccatagatagatcttggtgacgcgtaggaaaattttgaatttctgctacgttccccaacaattacgtcctagtgacacccaagtctagtgatatttgaagatactttggaattatcaaaagacataaatgatttgcaagagggggtacctccgaagtcgaggttgcgagtagcattcctgcgcatggccttcaccatagagtcctcgtcggtggctgctgatccgtcagtcccagcatgatgatgcatgctgtgccttagcgacgaaggagtaatatcgcccttggagcccatctcatagactccaagaggcgtagtagactactgcggtgatgaagaagaagatagtgggggctgctcctcagcctcctcatgtccggaagccggcgccgcccccggtggcggaggagtagatgataacgtgcatagctccgccatggcagactcctggccagctcgaattaacagggataagatcacaccacatcgagtcggagatgaaggaaatatgccctagaggcaataataaagttcttatttatttccttatatcatgacaaatgtttattattcatgctagaattgtattaaccagaaacatgatacatgtgtgaatacatcgacaaactcaatgtcactagtatgcctcaacttgactagctcattaatcaaagatggttatgtttcctaaccatagacatgagttgtcatttgattaatgggatcacatcactacgagaatgatgtgattgacatgacccgttccgttagcttagcacttgatcgtttagtatgttgctattgctttcttcatgacttatacatgttcctacaactatgagattatgcaactctcgtttaccggaggaacactttgtgtgctaccaaacgtcacaacgtaactgggtgattataaaggagctctacaggtgtctccaaaggtacatgttgagttggcgtatttcgagattagcttttgtcactccgattgtcggcgaggtatctctggcccctctcggtaatgcacatcactataagacttacaagcaatgtagctaatgagttagttacggaatgatgcattacgtaacgagtaaagagacttgccggtaacgagattgaactaggtattgggataccgacgatcgaatctcgggcaagtaacataccgatgacaaagggaacagcgtatgttgttatgcggtttgaccgataaggatcttcgtagaatatctaggagccaatatgagcatccaggttccgctattggttattgaccggaaatgtgtctcggtcatgtctacatagttcttgaacccatagggtccgcacgcttaaggtttcgttgacagttttattatgattttatgagttttgatgtaccgaaggttgttcggagtcctagatgtgatcacgaacatgacgaggagtctcaaaattgtcgagacataaagattgatatattggacgactatatttggacaccggaaaggttccgggcgagattgtgacaatatcggagctccgggaggttatcagaaccccccgggaggtatatgggccttattgggccttagtggaaaggaggggaaaggagcaagggagcccccccaagcccaatctgaattgggagccccctcccttttcttcctccctccttcctcttccttccttctccttctaattggaaaggggggaatcctactcccggtgggagttggactcccccctagggcgcgccaacccctttggcggccccctcctccactcctttatatacggggaggagggcatcccatagacacaacaattgatctcttgatcttttagccgtctacggtaccccctccaccatagtcctcctcgataatattgtagcggtgcctaggtgaagccctgcgacggtagaacatcaagattgtcaccactccatcgtgctgacggaactctccctcgacactcggctggatcggagttcaagggacgtcatcgagctgaacgtgtgctagaacttggagatgccgtagtttcggtgcttgatcggtcgggccgtgaagacgtacggctacatcaaccacgttgttctaatgcttccgctttcggtctacgagggtacatagacgacacactcccctctcgttgctatgcatcaccatgatcttgcatgtgcgtaggaattttttgaaattactacgtttccctacaggagaggcaggagtgggcgatgatgacggtgatatagcggtccctccagtaaggggcgcacacgacaccccacgtgggggttaggcggcggtgaccagcgagtcgaagatggtggcaaagagggccggggcgtcggcatcgtaggaggagcatccttaaacgaagtagccagccctgatggagtagacccctttaatgacgatgaagcagccgtgacaggtaagcctcaatgagggttcggaggtgtgacggcaatgtccatctgcatgggcaccacaccacccgaggaagtagggttcgaagagttgttggatgatgaagtgggtttggacctcttgcttggatcattggtcctcgctgtatgctccctgtcatgccccttgttgccccctggatcaccgccgtgctcctagactcgaggcacaaagtcactatcagcacggaagtctgattcttcaagactgtaccggaactcataacaattcctttgctccaccatgtctgaagaaagagaagcaattgtgctaattttgaaagcatcaaggttcaatatcgttacctagatacgaaaaattcctctcccgcacaaatagagaagatcaacatcgagagtagcaccaatcaccgagcagactgcccaaagccccaagaagtgtcggagagagtgaggcaccccatgcacatgaacccatataggaattagctcgaaacggtgtggtatcttctctgacttcgaaggcttaaactcgatagtgacattatgggatttgatgaaaactacgaagccagtcaccctttgtagaacctcctcactcggaaaggacatgagaaaagtgtgcttgccatgcggtatggcctcccacatccactgctactagtaatgagcaaatatttatgatttgtttctgttgtaatttagatgtcaaatttttatgattttttttgttcatagaatttttatgatttttttctgttttaattgtgttcatagaattttaatgattttttggtagttcattgattttttgttagatgtgtagttcatagatttttttgttagattttttttcatattgtgtaattaatttgttcatattgtattagattttttatgattttttctgttgtaatttagatgtcaaatttttatgatttggttctgttgtaatttagatgtcaatttttttcacattgtgtaagtaatttagatgtcaaatttttatgatttttttctattcatagaatttttatgatatttttctgttctaattttgttcatagaattttaatgatttttttgtagttcattgatttttttattagatgtgtagttcatagatttttttcatattgtctaattaatttgttcatattctgttagactttttatgatttttttcttttcatagaatttttatgatttttttctgttctaattttgttcatagaattttaatgatttttttgttcatagtattttttttgtcagtttatagtaagtgcttagtagttgaactagttgatttaattaataaaactactttatttaactatatatagaagtagttcccgcatcgacgtcgacgatgcctatcccgcatcctcgttgtcgtcgactcggtggtggtggaggcctgctcgatcagggccatgttcgggactgggctccgccgggctggtattgggaggtgctaccttatgggggacgtaggttggtgaggaggcagcccgttgttgacccgatccttgtttggtggcggtcgcgtgggccagtgacggtgctgaggcttccggtcaccgcggaggtggtacgtcactatgtcagcgaggaggacgagcacgcccgtcactacatggttgcgttggagggaaggttcgacaatacctggcaggttcttcagggatctcactggagctatgatcctgtgatcgttccttatctttaggtgtccaccgcccgcgacgatacccgtcgggcggtacggttctagctgtattttaattagcgatgctatatgtatgatagtattcgaggagtattcgatgatgtatggacacaagagatgatgtacttttggttataattgaatgcatgctaatttgaatactactttattttacgatttggttttgcttattgaatgctcatattggaaaagtactcctactttgactgctaaaattgaagagtactctatgcagaaatctaggagccccctccatcatccacgccgtcgtgggggtagcttctccttcattcccgtgtgctagacaatttgttgtaaaaatgcactcgggaatgaaaggaaaagctacgtaccatcaccgatagtcaacccgtgattaataataatgatctaatttaggttttttagtacatatatttaatatttgaattatgaacttaggccggaaatgtcgtactcggacgacgaaaaccgcccgaggaagtgcgactgaggtatgtgcgacaggttcattgagctggacgaagatcggtgattcagcattaagctcgaggagaccttcgatgttcatacggtacactacgacgacaatagtttttttcgtaattaagcacaacttcaactattttaatgtgtatttttcatcttttccaattcgactagcttatcccatgctatgcaagacgctatgtcttggagaggatgggttttgaagaccatgaaagtatagaaaccaaaaaaattctcctaaggacccatcatggtgtggattttcaagtaaagttgtacaatgctgagagtgtaacccattttggttgcaaaaattgggaagcactttgtaagatgtatggttttgataagggtatgcttgtcaccatggatcttggtgatcctacaatccaacaagacaatatgggcatttgggtccttgtggatacacctccaattcttccccangtgatcctacaatccaacaagacaatatgggcatttgggtccttgtggatacacctccaattcttccccaatgtgagcttaacatagttattaagtaatttatattgtttatttcaaaatagttgacagcttgtttccattgacagcttattttcattcttcaaagaatgtgcggaaaatggtagacaaaacccactacactgatggctccgaattaacttataaggataaaaatcatgtgatcgcattttgtactgatcttgagaattacaatgtctacaatcgaactcctcaacattatggtcaatacgtgccactagtgcacgtgttgaactacggtaactaccatggagataccctgataagattttttactattacgacatccctgcatctttttttaaatacttctaaaactagtacatcatttctaactatgaagttattactatgtttttcaacagataatcccgaatgattgtgtgcctatctgatgtatacgcacggtcaccttgatgttttgaacatacaaccaggttgtcctacgaatctcaattgtccataccggatttctaaaagaagtggagacatgacaatcaaagaatggaaaaaatgtatggacagtcgtaaggagcttcttgcaagcaaaaggaggcgaagcgcaagaattggagacaagatgatctccattcttcataatggagagtcaggttcaatattgttttatgctattttaccttaagggtgtttaggtcctacctgatactgatgaccatgtgctaagaacaattatgtagggttgggttcgatgactatgaggaggatgatcgtatgacttattattaataacgagtagaagttgtacgatgatgcatgattagtaggacttgttattatatatgatgatgtatgatacgagcatgcatgagttattatatatcagcgggtgaaatgaacatagcagtataagagtggacacttctctctattagctagctaataacaacctaaaattaacccccaaaacccctaaaccaacaaaaaaaaattaaaagaaaaacctcaactgctgacacgtggaagccttttggtcccggttcatgtcaccaaccgggaccaaaggcccccttgcctgggctgctcgcagtggccacgtggaggcccatctgtcccggttcgtgttagaaccgggactaaagggtggaggcattagtcacgaccctttagtcccggttcaagaaccgggactaaaggcccttgcgaaccgggactgatgcccccttttctactagtgtttatattttgattgtaatttatatttcaactattgttccactggaatatttccatgctatttatggatgagttgtgttacacctatagttatttggggtgcctcgaagataggaaaaaaccggaccgacatttggtgcacagggttggaacgttggctctcctatcggtatccgcgcatgtttgctgtgtatgtttccgtgttctgcgttcgagctgcccctgtgatatcgatgttttaaagcaaatagataccactactgcaaacgaaacaacgcttatttgtaatttagtgtgtcgaagaggaatataagataactagcacaaatgcatctaaaactgtaacgttattaaatacatcaattcagagggagcttgccatcacagaggaacttctaagcattctcatcgtaaattggtcatggtgctcggcagagagtagcagaatttggtgttgaagtccataaaatatttgtaatatagttttgcttccatccatgagttatgagatacaatcaaactgaagcatgactatgaattggagctaaatttgggggaatgatattatgcggaaattttgaagcggtaaagacgtgataccttagagagagagagagagagagagagcgagagagagagagagagttgtacatatcacatcgcagtggtatagagctattagtgcatcctaatgatgcagaggtcaggggttatcctcatttaagaaaatgttatgagtataataatagggaaatagacaatataaatagtacacacatgttatgattgtagtgatacatcagtacatcatacattgttgttgcatagctagtggtgcagtgatacaccatagatggtgcaaattttgtaagtcgcaaaaactttttcttttgatagaagcccatactgtctccctttctaattacttcaagttctagccttgtcctaagtcaaacttatttaagtctgactttttttctttcgataaaggacttttcattgaatagatatatcgaggtgatacaatcgtattgaaagaaagcccggcctctacatagctagatgcacacagccaaaaagtccagagcaccctaaaaataataattcgatacaatgccaagcaataaatcttgtccagcctaaggagcggtagatcctatccgtanccaaaaagtccagagcaccctaaaaataataattcgatacaatgccaagcaataaatcttgtccagcctaaggagcggtagatcctatccgtaaatcacaccgccatccatggggatagaaaacctccgtcgacgtacactccagccgtgtagacgccatcataaaaaggtccatgtcctccggcttctgcaggatagaccaagtacggagccatcatgtacaaacatgaataacctgcataggagatgagacacatttattgttaaaaaccacatcattcctggtaagccacattgcccagcataaggccgccgctcccacaagaatatgtgcagaaaattctttatcaataccccgcaaccagttgccgaaaatattccttggactacgtggtgggtataaattcgaagctacttggaacatggcccaaactgccagagcgagcttgcactcaaaaaataagtgtttgatagactcgtcatgttggcaaaagacacatgtcttcgaaccatgccagtttcatggtgccagattatctgtagttaggatgactgctttgtttagaaaccagaggaaaatcttcactcttagaggaatttttagcttccacaatttcctgttatctactggaacatcacaatgaaccattgcatcatacatggatttgaccgaaaatttgccattgtgatgcaagttccatcgaaaagtgtctggctcatctgacagttgaatgtcctcnnnnnnnnnnnnnnnnnnnnnnnnnnnnnnnnnnnnnnnnnnnnnnnnnnnnnnnnnnnnnnnnnnnnnnnnnnnnnnnnnnnnnnnnnnnnnnnnnnnnnnnnnnnnnnnnnnnnnnnnnnnnnnnnnnnnnnnnnnnnnnnnnnnnnnnnnnnnnnnnnnnnnnnnnnnnnnnnnnnnnnnnnnnnnnnnnnnnnnnnnnnnnnnnnnnnnnnnnnnnnnnnnnnnnnnnnnnnnnnnnnnnnnnnnnnnnnnnnnnnnnnnnnnnnnnnnnnnnnnnnnnnnnnnnnnnnnnnnnnnnnnnnnnnnnnnnnnnnnnnnnnnnnnnnnnnnnnnnnnnnnnnnnnnnnnnnnnnnnnnnnnnnnnnnnnnnnnnnnnnnnnnnnnnnnnnnnnnnnnnnnnnnnnnnnnnnnnnnnnnnnnnnnnnnnnnnnnnnnnnnnnnnnnnnnnnnnnnnnnnnnnnnnnnnnnnnnnnnnnnnnnnnnnnnnnnnnnnnnnnnnnnnnnnnnnnnnnnnnnnnnnnnnnnnnnnnnnnnnnnnnnnnnnnnnnnnnnnnnnnnnnnnnnnnnnnnnnnnnnnnnnnnnnnngaaaatttgccattgtgatgcaagttccatcgaaaagtgtctggctcatctgacagttgaatgtcctccaggcgagtgagtaattcattccatgctgccagacgagtgcccaaaagatccctacggaaagaaatatcgcggttttcttgtcctaagacttgtttgatcgtgataaatttatgtctgacaatctggtacaagttcggatattgcatcattagtgagttgttccctagccaggtatcttcccagaaacgaacctgagaaccgtccctaaccgagaaggtcccaaattgatagaagaattccttggccttcatgacaccgctccaaaaatgtgaatccccaggtttcctatgaatttgagaaatggcattggatcccacatacttgttgcgaatgatttcctgccatactccattctcggtgagtagtttataaacccacttgctgagaagagcaatgttttaaatctcaaggtcttggattccgaggcccccttgacttttaggtctgcataatacgcttcacctagccagtcgatatttcttgatttcattatcacaatgccacatacgacggaggagatggccaccatcgtcggctgcaccggaaagatcatatctgaccggaggcgccactgaccagatcaccatggcctccacgtcgtcgccgcagatccaacgcatgatggcgcaccgaccgcagccgccgcccttcccggtataggcccgcgccacacctgcagctgccaccgcccgaggcaaggtggccaccacgccgccgcaaccatcgcaaaccgcgccgcaaagtggatcggccgccgagctcgcatcataggcggcgccgccgcgccgcacacgccgccgccaagagttgtcgcctggcgcctcctcgtgatctggccgtctcgcaccggccgtgatgctcgaagggtggagaagtcccgccgccgccctgtcgtcccggctttgcttagcggcactgccgacggtggcgaggagaggggaggggcgggtggggtcgagtggtggcggctaaaacgcggttaagagtttggtttttttagaataaatatttttgatggggacgatgggagcgacgtaaccaaatgaaacaaaactacctacgtactccactttaataggagaaagataattgtatattacttcctccgtcgcatagtgtcaaaaacacttttatattatgagatccacggagtatagagcaccaacaacacttcacggcatccggtaacacgcttgttgggtttccgggtcgttgggacgactgggactgtcttgggctttgcagtgtccttgggtgacgccggctgggttggtgttggtccgtgacagtttcgggctcaggctggaaaaaaggacgcgggcgaggaagaaattgacacggccggctgttggatgggagcacggccggctgttggagttggatgaggactgcactcaagtcaaaccgtttaacctacccttaaccatatctacatcggatataacttggggaaagcgacggggaactccctactatataagctcggccacctacgccccaaacaaatcacaaccaaccttccccaagtcgttagttcccccgagcaatcgagttgtgttcccagcgatcgatcgatctaggtgagcatcatggtttccgccgacgtggcccgcaacatcgtcggcatcatcggcaatgtcatctccttcggccttttcctctcccctgtgtaagcccactcctcctcctctcgtctagtctgtatgtatacatatatgaaaggtggttgctagggcatgaatctgaggctcgttttctaattgtacgtatgtacgcaggccgacgttctggcggatctacaaggccaaggacgtggaggagttcaaaccggacccctacctggcgacgctcatgaactgcctgctctggttcttttacgggctccccatcatccaccccaacagcaccctcgtcctcaccatcaacggcatcggccttgtcattgagggcgcctacatcatcatcttcatcatctacgcggccaagaacacaagggtatgtacgtgcaacccttctaatgcctcctcaatcctcatccgtcccactgtcttttttggctttagtttccttacagaagatcctccagcccctaacccaagctatgtgcatgtgctctgctgtgtgtgcagtggaagatgctcggcgtgctcgcccttgaggcggcgttcgtggctgccgtggcggccggtgtgctcctcggtgcccacacccatgagaagcgctccatgatcgtaggcatcctctgcgtcatcttcggctccatcatgtacgcctccccgctcaccatcatggtacgtacaccaccccaacttaagggtcgtcgacccgtgatctttgataaccgctttaacttgttagttcaggtggctaattaattaatttgcattgtgcacgtatggtgtggtaatgatgcgttttcaagaaaaatacctgcctataatttatttttaaagttctagtggatgcttttgacagaccttaatttgttaagcagtacaccttgtttgttgttgattatgtccatctaaaagctgcacccacctttcatttttttaatgctcgtgccaaaaccctgttaaaaaaagtccgaattgacttttcacctctcacgcacccaaattcttctacaatatgctacatgatatattgttaatcaaaaaagcctacggtttatttctatctcaaaggtaaacttcctttacagggtgaaatacgagctcaggctaattgtaaatgacggatgcttttgccaacttacgagtgtactaatacaaatataactcaaaaagttaagatgaaagtagtaatattgtactgcctatttgcagggtaaagtgatcaggaccaagagtgtggagtacatgccattcttcctgtcgctggtgaacttcctcaatggctgctgctggacggcctatgcgcttatcaagtttgacatctacatcacggtatgtacatacacatacacattggaaataagaagtcgcaaacccagccaaacatacaatcaagaaatcctcagcgcggattgatctaacttttatgtcctctttaaattttgtgcagatccccaatgccctcggtacaatctttggtctcatccagctgatcctgtacttctactactacagatcgacccccaagaagggcaagaatgttgaactgcccactgtcctcaccaaaaacgccgttaccagcggcaccgtctccgtcaccatagagaaataaacgtggcttcgttttttagccctaatgattttgagttgttaataccggatgatacttcaacaacaagttgatgttaatttgtactactttttgttagctagtagagtctgagatcacctttaatttcgtgaaccattgtcgtctgtccgagactactagtgcaaattacaagtgtatataaataccaatccagctgagttatcccagagatatattatgacaccatgtatgcttgcctgttttcaatctgctcctacgtgatgatacgattgaatttttaattacagcgtgcgatggctttgttaaattaaattattcaatatccatgatgtgtttgtattatgtttcgggcaaggtcctattttgttttctgcacaaaaacacccaatgggcttcttattggtgatgcaacttttgaacccggtgtgagaaaaaaaggagaaagacttaacctaattaccggtttggttggatggctcctgctcatttcccgtgacgctgccttgttaccacatcgacaggcaacgagcagctctgcagcttggtcaagtatgacgcttttttctgaatcttgtaacatgttaattgtttgtcatatatatttcaaagcagtgtgtttaatcgcatggtgtctactctatatatagacacacttctttgtcaagaaaaaatagttgagtataggaagagctccgctcaaattagatagcccaccaacttgtgggtctaactattaagacaccagccctttctcacaaatttctattaagggaaataaaaataacatccaacttga

SEQ ID NO: 99 - protein, 245 aa, Triticum aestivum
MVSAEVARNIVSIIGNVISFGLFLSPADVLGIYKAKDVEEFKPDPYLATLMNCLLWFFYGLPIVHPNSTLVLTINGIGLVIEGAYIIIFIIYAAKNTRWKMLGVLALEAAFMAVVVAGVLLGAHTHEKRSMIVGILCVIFGSIMYASPLTIMGKVIRTKSVEYMPFFLSLVNFLNGCCWTGYALIKFDIYITIPNALGTIFGLIQLILYFYYYRLTPKKGKNVELPTVLTKNAVTSGNVSVTIEK

SEQ ID NO: 100 - DNA, 738 bp, Triticum aestivum
  source 1..738: mol_type = unassigned DNA
atggtttccgccgaagtggcccgcaacatcgtcagcatcatcggcaatgtcatctccttcggcctcttcctctcccctgccgacgttctggggatctacaaggccaaggacgtggaggagttcaaaccggacccctatctggcgacgctcatgaactgcctgctctggttcttttatgggctccccatcgtccaccccaacagcaccctcgtcctcaccatcaacggcatcggcctcgttattgagggcgcctacatcatcatcttcatcatctacgcggccaagaacacaaggtggaagatgctcggcgtgctcgcccttgaggcggcgttcatggctgtcgtggtggctggcgtgctcctcggtgcccacacccatgagaagcgctccatgatcgtaggcatcctctgcgtcatcttcggctccatcatgtacgcctccccgctcaccatcatgggtaaagtgatcaggaccaagagtgtggagtacatgccgttcttcctgtcgctggtgaacttcctcaatggctgctgctggacgggctatgcgctcatcaagtttgacatctacatcacgatccccaatgccctcggtacaatcttcggcctcatccagctgatcctgtacttttactactacagattgacccccaagaagggcaaaaacgtcgaactgcccactgtcctcaccaaaaacgccgttaccagcggcaacgtctccgtcaccatcgaaaaataa

SEQ ID NO: 101 - DNA, 4222 bp, Triticum aestivum
  source 1..4222: mol_type = unassigned DNA
tgacttgacagctccaccgaagctccgtccaagacgaagccgctccaccttctgcctctgtgctccagcgctgctccacaaaagatgctcccaatagagaaacggcgccttagtaccgtcatcgtccgatctggaagaccaaatcctaggtttaccccaaagcagcatgatgggtcgataacagttacacaacgatgtattcatcaaggtaacggcgcaaaacgccaccatcgcctaccaacggctcggttttcaccaacaactatgtcttcccgacttgcagccggagctagatgacggatcttgagatctgaccatccagcgtcaggccgaccacctccgacagaggagatggccaccaccgccggctgcaccggccagatcataccagacccgaggcgccgcctagaccaccatggcctccacgcttttgccgccgatccgacgcccgatggcgcgccgaccgcagccgctgcccttcccggtacaggcctgcgacgtgcctgcatctgccgctgcccgaggcagggccgaccaccacgccgccgcagccaacgccgccacagcgcaaagtggaccggcggccgagctccaaacggagaacaagagttggatttttttagaataaaaattgttgaggggggacgttagggcgtttgatcgatgggggaacgaggtaaccaaacaaaacaaaatgacctacgcactccactttaatagtagaaagataattgtatattactccctccgtcgcatagtgtcgaaaacactcttatattatgagatcgagggagtagagcaccagcaacacttcacggcctccggtaacacgcgtgttgggcttccggagtggttgggacgactgggtcggtcttgggctttgcactgtccatgggtgatgccggctgggtcggtgttggtccgtgacagtttcgcgcccagggttgtccttatttgttttgcgtacgactgtatcgggtttatccgactaggagtattgttacgtggcagaggagctagctcctagctgcgtgatcctttttcgtttggaaaatggacgcgggagaggaagaaattgatacggccggccgttggatgggagcacggccggagaaggagttggatgaggactgcactcaaatcaatccgtttaacctacccttaaccatatccacatcggatataagctcggccacccacgccccaaacaaataacaaccaaccttcctcgagtcgtttgctcccggcgagcaatcgatctagctgagcatcatggtttccgccgaagtggcccgcaacatcgtcagcatcatcggcaatgtcatctccttcggcctcttcctctcccctgtgtaagcccactcctcctctcgtctagtctgtatgtatacatacatgaaaggtggttgctaggtcatgaatctgaggctcgttttctacttgtacgtacgtacgcaggccgacgttctggggatctacaaggccaaggacgtggaggagttcaaaccggacccctatctggcgacgctcatgaactgcctgctctggttcttttatgggctccccatcgtccaccccaacagcaccctcgtcctcaccatcaacggcatcggcctcgttattgagggcgcctacatcatcatcttcatcatctacgcggccaagaacacaagggtacgtacgtgcaaccctcctaatgcctcctcatccggcctaatgtctcttttcgtctttagattctgtatacagaagatcctccagcccctaaccaaagccatgtgcatgtgctctgctgtgtgtgcagtggaagatgctcggcgtgctcgcccttgaggcggcgttcatggctgtcgtggtggctggcgtgctcctcggtgcccacacccatgagaagcgctccatgatcgtaggcatcctctgcgtcatcttcggctccatcatgtacgcctccccgctcaccatcatggtacgtacaccaccccaacttaagggtcgtcgacccgtgatctttgataaccgctttaacttgttagttctggtggctaattaattaatctgcgttgtgcacgtgtggtgcggtaattatgcgctttcaagaaaaaatacctgcctataattaatctgcgttgtgcacgtgtagatgcttttgacagaccttaatttgttaagtagcacaccttgtttgttgttgattctgcttgaaaatctatgtacatctaaaagatgtacccacctttcattttttaacgttcgtgccaaaaccctgttaaaaaatccgaattgagttgttcacctctcacgcacccaagttcttctacagggtgaattactagctcaggctaattgtttttgccaacttaggagtgtactaatactaatattactaaaaaaaataagatgaaagtagtaatattgtactgcctatttgcagggtaaagtgatcaggaccaagagtgtggagtacatgccgttcttcctgtcgctggtgaacttcctcaatggctgctgctggacgggctatgcgctcatcaagtttgacatctacatcacggtatgtacatacacatacacattggaaataagaagtcgcaaacccagccagacatacaatcaagaactcctcagcgcggattgatctaactgttatgtcctctttaaattctgtgcagatccccaatgccctcggtacaatcttcggcctcatccagctgatcctgtacttttactactacagattgacccccaagaagggcaaaaacgtcgaactgcccactgtcctcaccaaaaacgccgttaccagcggcaacgtctccgtcaccatcgaaaaataaacatggcttcgtttttagccctagtgattttgagtagttaataccggatgatacttcaacaagttgatgttaattagtactactttttgttagctagtagagtctgagatcgcctttagtttggtgaaccattgtcgtctgtccgagactaatagtgttatttcaagtgtatataaataccaatccagctgagttatcccagagatgtattatgacaccatgtatgctttcctgttttcaatctgctcttacgtgatgatacgattgattttttaattacagcgtgtgatggctttgttaaattaaattattcaatatccatgatgtgtttgtattatgtttcgggcaaggtcctctttcgtttaatgtacaaaaacacccaaagggcatcttattggtgatgcaacttgaacccggtgtaagagaaaaggagactgacttaacctaattaccggtttgtttggatggctcctgctcttttcccgtgacgctgccttcttaccacatggacaggcaacgagcagctctgcagcttggtcaagtatgacgcttcgagtcgtccctgctagagatatttttctgaatcttgtaacatgttatttgtttctcatatatatatcaaagttgtgtgtttgatcgcatggtgtctactgtatatatagacacacttctttgtcaagaaaaatgagttgactataggaagagctccgctcaaattagataggccaccaacttgtggctataactagtaagactccagccctttcccacaaacttctattaagggaaataaaaatcacatccaacttgaagcagcatccaaactagcagcccaggctagctaaacacatcaactttaggctacatactgtgttttaatatccaagagcaaggtttttttatcaatttattttctttgtatttgaatgatctcgagtcacctagcgataattactatatgaatctagttagattctatttgatcaatgatcacttattataatttgttaggttttcttcctggatcatcattatgtctactagaattaggaaacatgattctggtgctgcaaaacaaagcctggatcttgaggctcgaactcaagagtgccctcgatagatatttagtgagcctgccaacctgattgtgaaaatcaaactgcagatgttaatgttgacgatgggggtgaagataatacaatggtggttgtggaacatgatgcagaaattgatgtcttggagatatgatatagtacgaaggtatgattgaagattatattccaagaaatactagacggatggtcctttttggtagaacacgaggttcgttcattgctttgctatcacattaccattttagcataatatctgatatatggttaaataaggta

SEQ ID NO: 102 - protein, 303 aa, Triticum aestivum
MAGGLFDMSHPASALAGIAGNIVSFFVFLAPMATFLQIYRKKTTGGFSSVPYVVALFSCSLLIFYALLKTKSPLLLTINSFGCCIETVYIIAYLVYAPPRARLRTLAYFFVLDVAAFGLVLVVTMYAFAPAHRVKFLGSVCLAFSMAVFVAPLSIIVKVIKTKSVEFLPVGLSFCLVLSAVAWFCYGLFTKDPFVMYPNVGGFFFSCVQIGLYCWYRKPSNAVLPTTTADAGNGNGGAAEQPQVQVIELPAHSVAILSVGPVPILGVHKIEVMAAEQQTVIDVKDAAEADQPEVIEIVPAPAV

SEQ ID NO: 103 - DNA, 912 bp, Triticum aestivum
  source 1..912: mol_type = unassigned DNA
atggctgggggcctcttcgacatgtctcacccggcgagcgccctcgccggcatcgcaggaaacatcgtctccttcttcgtgttcctcgcgccaatggcgacgttcctgcagatctacaggaagaagacgacgggcgggttcagctcggtgccgtacgtggtggcgctcttcagctgctcgctgctcatcttctacgcgctgctcaagacgaagtcccccctcctgctcaccatcaacagcttcggctgctgcatcgagaccgtctacatcatcgcctacctcgtctacgcgccgccccgcgccaggctcaggacgctcgcctacttcttcgtcctcgacgtcgccgccttcggcctcgtcctcgtcgtcaccatgtacgccttcgcgccggcccaccgcgtcaagttcctcggcagcgtctgcctcgccttctccatggccgtcttcgtcgcgccgctctccatcatcgtcaaggtgatcaagaccaagagcgtggagttcctgcccgtcggcctctccttctgcctcgtcctcagcgccgtcgcgtggttctgctacggcctcttcaccaaggacccattcgtcatgtacccaaacgtgggcggcttcttcttcagctgcgtccagatcgggctctactgctggtaccgcaagcccagcaacgccgtgctgcccactaccaccgccgacgccggcaacggcaatggcggcgccgcggagcagccgcaggtgcaggtgatcgagctgcccgcgcactccgtcgccatcctgtccgtgggccccgtcccgatcctcggcgtgcacaagatcgaggtcatggcggcagagcagcagaccgtcatcgacgtcaaggacgccgccgaggccgaccagccggaggtcatcgagatcgtccccgcccccgccgtgtga

SEQ ID NO: 104 - DNA, 4889 bp, Triticum aestivum
  source 1..4889: mol_type = unassigned DNA
gtgaatggcttggaaacttttataatgactaattaacaatatcagaggaacaacaaatattgggagtcgaaacaattaatgcagcacatacgagaaggcccttttatatatgtatacataggcatatatattgtttactactccctccgttcacaaatgtaagatgtttcggatatttcaatatggactatatacagactgaaatgagtgaataaacacactaaaatgtatgcctgttttatgaaacataatgagcaatttagttaataaaaatatagttaggatgtgttacattgtaattttgcttatgtgacaatctaggagtctgtccaacatggagcaccgcgagatgcctcacacacatagctacatcattactccattatcaaatgaatctttccctcctgatcacacaaactttccaagaccagacacacgttttcaaaacccattttgcctacgttccaaatgcagcaaacgttcacagaggggagagggagacggagacagagcagttattgaaatagctatcaagtatagttaccaaatgtgtaagtaaatctcagcatcacccaactacatctcctgtagaggtatcactaacaccgcaaccaacatcgtccctcgcaaccagcggagcgtgaagacacaaccggcctgcccgtgtcacatcaactgcaacgctgatgatgcaccagagaaactcatgaaaaaaccaagaaagaaatactcctatctctctctatattaatacagcagtatacaaggtttggagaaattgattttcctttgtatactagacaaagaatgagatggcgtgagttggttattgttgtaagtactactccctccgtaaagaaacataagagtgtttagatcactattttagtgatctaaatgttcttatatttgtttacagagggagcacttaggtacagagacctgggttcaaatcttgagatggtgtttctttcattttccttggcccagccgatcattttgcgttcgttttcaaaactcatttcgcctacgttccaaatgcagcaaaaatgtttcgcagaggggggagggagacggaggcagagtggtagctggtgcgttcacaaggccgggcaggctgatcatgcggccaggagtggctgctcactgtacagcaccagcgcccgcgtctatataagccagcggccgtcgccgaggccaaagcacacaagcagcaggcgcatctcctcgagagctcgcactgatccttgtgtcacccggaaagggagtaggagaggggactcttggcttcgggactagttcttggctgagatcttctccctccctccctccctccctcctttcctctccctcagctgataccttcgctagccagcagtagccgagtcgccgtcgcaatggctgggggcctcttcgacatgtctcacccggcgagcgccctcgccggcatcgcaggtacgcaattcatggagaaaatgcagtttcattctgtgtttgtatgtcatttggcacagcacacctttggtgcttcctctcttccttcttgttgagcagtctgatgtgcatttgtcgcaagatcgatcgtctaggttggctcatgcatgcataggcatagggtagggaagcgcatctccaaaacccaaccacctcccaattctagcaagaacacatccttgaccggttgctgacagacgacacaaacacatttaggcacagatcgatcgatcacacctaaaaggctaagaccccatcaattgtgcgtgcatttcgtagttaatgcatttgtcaccaacagctcaccgtgcactctctgtggatctctctgccaaattccctttcttttcttggaatggcgattggttgagcggcgacggacgcgtgcgtgctctcccctgcaacttccttgccgttggttgcacccgagcactaaataaattaaaaatgaataaatagtaacattccactactaatcataggtgccaaaagaactaattaaaggatgccactgacaaaactaacggcgtcgattttcctcttccttgatctcgtgcaggaaacatcgtctccttcttcgtgttcctcgcgccaatgtaagtatctaaccagctgctaattccttcctatcatgcatgttgttcaagtaatctttgacgtacgcacgccattgatgcatgcatgtggtggtgttgagctgacgatacggtatgggtgcagggcgacgttcctgcagatctacaggaagaagacgacgggcgggttcagctcggtgccgtacgtggtggcgctcttcagctgctcgctgctcatcttctacgcgctgctcaagacgaagtcccccctcctgctcaccatcaacagcttcggctgctgcatcgagaccgtctacatcatcgcctacctcgtctacgcgccgccccgcgccaggctcaggacgctcgcctacttcttcgtcctcgacgtcgccgccttcggcctcgtcctcgtcgtcaccatgtacgccttcgcgccggcccaccgcgtcaagttcctcggcagcgtctgcctcgccttctccatggccgtcttcgtcgcgccgctctccatcatcgtaagccgcctctctcttctgctctgcttcgatcgttttggccggccatgcatggcagttgacatggcaatatggcatgcaggtcaaggtgatcaagaccaagagcgtggagttcctgcccgtcggcctctccttctgcctcgtcctcagcgccgtcgcgtggttctgctacggcctcttcaccaaggacccattcgtcatggtatgccacctagctacttgttcccttaacttggcattgctgccactgccactgatacattgagtgggtggatctctgactccgccatgcgcgcatgcatgcagtacccaaacgtgggcggcttcttcttcagctgcgtccagatcgggctctactgctggtaccgcaagcccagcaacgccgtgctgcccactaccaccgccgacgccggcaacggcaatggcggcgccgcggagcagccgcaggtgcaggtgatcgagctgcccgcgcactccgtcgccatcctgtccgtgggccccgtcccgatcctcggcgtgcacaagatcgaggtcatggcggcagagcagcagaccgtcatcgacgtcaaggacgccgccgaggccgaccagccggaggtcatcgagatcgtccccgcccccgccgtgtgagacaggcttccaccccacccaccccacaaacatcgacgacgacacgacacgagcatgcatgacacgccacacggcatgcatggagatggagaactgatgggtttggttaattagttaattactgagtagtagtatcatcgtactgcagggtgcgcttgcgtgtggattacttactttgttaatttattattactggattgtactgcgtggtgttagttaaattattaccttcaggtgtgtgcctcgatctctcttaatcagtagtagtccgcaggttggtgcggtgacaataataataagacacgacctactacttgtgcatgttgtgacgcatgcatgtgtactggtcattcatgctgtatgttgcagtgagtctctctcgtctcagaccttgcctgattcgtgtcatccatccatcgattcatcaatagactgcaatatgacagtatattaattaattagcttggctgtctctttctacttatactactgtttgctggctcgacctactagtagtgcctactagaagtcggcctaccaaaagcgtaaagcgcaatggttgatcaagcaaacagtggaatctagaacaccagagcttagcacaataaagacaagatttatttcacgacacaccccgcactgaaacaagctccaaggaagcgggcctctactgtctcaaagtgcctgaaaattcacaatcggagcaagatttaaacggtttcttggagcaacccaaaggcagctcttagaaatgtgggtgtaggtttaccgacacgagaagcttgccactagaaacaatcatctcccacctgaccttatcgggttgcaactgcaatgcgatacaaagacatcaaagagagtcttcgacaaaaaatgccatgaacaaagaacagtgagaaagttacacagagacatagatcatgttaagagtctggtcaactgtgacttctttacctccttgtcaacagaggcatgctccttagatccataaacaacttcataatcactgccaaacaaaaataaatagtagcaccaacaccggcttaaaattttacacgcaaaaaaagaaacaccggcttaaaattagcgggcagcagaaagaggacatttgcagaacaacactgcaatttatctgttacattaatttctgatgatacatagtatatagcgtctcaatcctcaaacgggtgacaccgtgaaggcactgcttgatttcagtaattcaaggatttctctgtagggtttgtgttggtcaaaatagccacaacaacaaatgcacacaagttttcagtaaatttttggcatcgaccatttaggtatccctcgtttcacttgcttgtccggcgtggagagctggctatgaggattgcattgggtattcagaaacgagctaacattgatgatatgcatggaaattggaccaggatggtcactaacccctgtctctctcacccctgtctctgggatgggagatggtggtggcttgttgtacatgtgttacagatatttaaatactgtacaagatagtacgaggctctcctgctgccctttgccactcaaaaaaaaaggatggtcgctagacagctgagatcgtagtgggagcagcagctgcttgtagagctatttggctcaataagaatgaagtgacgtccgatcgccaagtcattaacca

SEQ ID NO: 105 - protein, 298 aa, Triticum aestivum
MAGGLFDMSHPASALAGIAGNIVSFFVFLAPMKKTTGGFSSVPYVVALFSCSLLIFYALLKTHSPLLLTINSFGCCIETVYIIAYLVYAPPRARLRTLAYFFVLDVAAFGLVLVVTMYAFAPAHRVKFLGSVCLAFSMAVFVAPLSIIVKVIKTKSVEFLPVGLSFCLVLSAVAWFCYGLFTKDPFVMYPNVGGFFFSCVQIGLYCWYRKPSNAVLPTTTADAGNGNGGSADQPQVQVIELPVHSVAILSVGPVPILGVHKIEVIAAEQQTVIDVKDAAKAAEVDQPEVIEIVPAPAV

SEQ ID NO: 106 - DNA, 897 bp, Triticum aestivum
  source 1..897: mol_type = unassigned DNA
atggctgggggcctcttcgacatgtctcacccggcgagcgccctcgccggcatcgcaggaaacatcgtctccttcttcgtgttcctcgcgccaatgaagaagacgacgggcgggttcagctcggtgccgtacgtggtggcgctcttcagctgctcgctgctcatcttctacgcgctgctcaagacccactcccccctcctgctcaccatcaacagcttcggctgctgcatcgagaccgtctacatcatcgcctacctcgtctacgcgccgccccgggccaggctcaggacgctcgcctacttcttcgtcctcgacgtcgccgccttcggcctcgtcctcgtcgtcaccatgtacgccttcgcgccggcccaccgcgtcaagttcctcggcagcgtctgcctcgccttctccatggccgtcttcgtcgcgccgctctccatcatcgtcaaggtgatcaagaccaagagcgtggagttcctgcccgtcggcctctccttctgcctcgtcctcagcgctgtcgcctggttctgctacggcctcttcaccaaggacccattcgtcatgtacccgaacgtgggcggcttcttcttcagctgcgtccagattgggctctactgctggtaccgcaagcccagcaacgccgtgctgcccactactaccgccgacgccggcaacggcaatggcggctccgcggaccagccgcaggtgcaggtgatcgagctgcccgtgcactccgtcgccatcctgtccgtgggccccgtcccgatcctcggcgtgcacaagatcgaggtcatcgcagcagagcagcagaccgtcatcgacgtcaaggacgccgccaaggcggccgaggtcgaccagccggaggtcatcgagatcgtccccgcccccgccgtgtga

SEQ ID NO: 107 - DNA, 4870 bp, Triticum aestivum
  source 1..4870: mol_type = unassigned DNA
tatttcaatatagacttatatacagactgaaatgagtgaataaacgcaccaaaacgtatgcctgttttatgaaacacaatgagcgatttaattagtgaaaatatagttaggatgtgttacattgtaattttgcttatgtgacagtctaggagtctgtccagcatggagcaccgcgagatgcctcacacatatatagctacattattactccattatcaaatgaatcttcccctcctgatcacacagctttccaagaccagacacacgttttcaaaactgattttgcctacgtctccaaatgcagcaaacgttcacagaggggagagggagacagagacaggagtagttattggagtaaatagctatcaagtatagttaccaaatgtgtaagtaaatctcaacatcacccaactagatctcctgtatttttttttttttttttgcgagtgaactagatctcctgtagaggtatcactaacaccataaccaacatttcacaaccagcggagcgtttcgtgaagacaccggccctgcctgtgccacatcaactgcaacgctgatgatgcactagagaaactcatgaaaaaaccaagaaagaaatatgggatctctccatattaatacagcagtaaacaaggtttaaagaagctgatctttcagtttccttggcccagccgatgcgtacggtaccaaatcaacgagggaaaacaagaaccggtccggtggtctgtccaccggttttcaacaaaaaaggaaaaaagggtgaactagcggttttcaacagaagtagtaagtacaggatctcaaggtggccgaggagcgaagccgggcgccgtgcgaaggtcgaattgtttgggctttttgtagctatataaaattcttacgctcgatcgccatttacttttcctcgtaaaaataaatgtaccatctttccctctcgatcacacgactttccaagactaaaccacacagacacgttttcaaaactcgtttttgcctacgttccaaatgcagcaaaatgttgacagaggggggaggggagtggtagctgctggtgtgttcacaaggccgggcacgggcaggctgatgaacggatccctggatctggatcgatcatgcggccaggagtggctgctgtactgtacagcaccagcgccgcgcccgtctatataagccagcgcccgtcgccgaggccaaagcacacaagcagcaggcgcatctcctcgagagctcgcactgatccttgtgtcacccggaaagggagtaggagagggggctcttggcttcgggactagttcttggctaagatcttctctctctctctctccctccctcctttcctctccctccagttgataccttcactagctagcagtagccgagtcttcttcgccgtcgtggtcgcaatggctgggggcctcttcgacatgtctcacccggcgagcgccctcgccggcatcgcaggtacgcaattcatggagaaaatgcagtttcattcagtgtttctgtgtcatttggtgcttcctctcttccttcttgttgagcagtctgctgtgcatttatcgcaagatccatcgcctgggttggttcgtgcgtgcatagggtagggaagcgcatctccaaaaccccaccacctcccaattctagcaacaacacatcctcggttgctgacaaacaacagagacacgcacggacacagatcacacctaaaaggctaacccccccatcaattgtgcgtgcatttcctagttaatgcatttgtcaccaacagctcaccatgcactctctatcgatctctctgccaagtcccctttcttttcttggaatggcgattggttgagcggcgacggatgcgtgctctcccctgcaacttccttgccgttggctgcacccgcgcactaaataaattaaaaatgaacattctactactaattataggtgccaaaagaactactaattaaagaatgtgactgacaaaactaacggcgtcgattttcctcttccttgatcgtgcaggaaacatcgtctccttcttcgtgttcctcgcgccaatgtaagtatatatctaaccagctgctaattcattcctatcatgcatgttgttcaagtaatctttgacgtacgtaagtacgccattgatcgatgcatgtggtggtgttcaatcaactgacgatgggtgtcgcgtacgtgcgggtgcagggcgacgttcctgcagatctacaggaagaagacgacgggcgggttcagctcggtgccgtacgtggtggcgctcttcagctgctcgctgctcatcttctacgcgctgctcaagacccactcccccctcctgctcaccatcaacagcttcggctgctgcatcgagaccgtctacatcatcgcctacctcgtctacgcgccgccccgggccaggctcaggacgctcgcctacttcttcgtcctcgacgtcgccgccttcggcctcgtcctcgtcgtcaccatgtacgccttcgcgccggcccaccgcgtcaagttcctcggcagcgtctgcctcgccttctccatggccgtcttcgtcgcgccgctctccatcatcgtaagccgccgtctctcttctcttctgcttccatcgttttggccggccatgcatgacagttgacatggcaatatggcatgcacaggtcaaggtgatcaagaccaagagcgtggagttcctgcccgtcggcctctccttctgcctcgtcctcagcgctgtcgcctggttctgctacggcctcttcaccaaggacccattcgtcatggtatgccacctagtagctacttgttcccttaacttggcattgctgccactgccactgataccttgagtggatggatctctgactctgccatgcgcgcatgcatgcagtacccgaacgtgggcggcttcttcttcagctgcgtccagattgggctctactgctggtaccgcaagcccagcaacgccgtgctgcccactactaccgccgacgccggcaacggcaatggcggctccgcggaccagccgcaggtgcaggtgatcgagctgcccgtgcactccgtcgccatcctgtccgtgggccccgtcccgatcctcggcgtgcacaagatcgaggtcatcgcagcagagcagcagaccgtcatcgacgtcaaggacgccgccaaggcggccgaggtcgaccagccggaggtcatcgagatcgtccccgcccccgccgtgtgagacagacttccaccccacccaaccaacatcgacgacgacacgacacgacacgagcatgcatgatacgccacacgacatgcatggagatggacaactgatgggtttggttaattagttaattattactgagtggtagtatcatcgtactgcagggtgtgcccgcgtgtggattacttactttacttagttaatttattattactggattgtactgcgtggcgttggttaagttattattaccttcaggtgtgtgcctcgatctctcttaatcagtagtattagtccgcaggttggtgtggtgacaataataataagacacgacctactacttgtgcatgttgtgatgcatgcatgtgtactggtcattcatgctgtatgttgcagtctctctcgtctcagaccttgcctgatttgtgtcatccatcaatcgatcagtaaaatagactgcaatatgacagtatattaattattaattggaggttctttcatttactatgattgattagcttggctgtctctttctacttatactgtttactggctcaacctactagcagtgcctactagaagtcggcctaccaaaagcgaaaagtgcaatggttgatcaagcaaacagtggaatctagaacaccacagcttaattagcacaataaagacaagatttatttcacaacacacccatcaacaaacgcactgaaacaagctccaaggaaccgggcctctactgcctcaaagtgcctgaaaattcacaattggagtaagatttaaacggtttcttggagcaacccaaaggcagctcttagaaatgtgggtgtaggtttataaaaacacgagaagcttgccaccagaaacagtcatctcccacctgaccttatcgggttgcaactgcaatgcgatacaaagacatcaaagagagttttccacaaaaaatgccatgaacaaagaaccgtgagaaagctgcggaggcagggatcatgttaagagtccggtcaactgtggtttctctacctccttgtcaacagctagtgtttttgtagacaacggaggcatgctccttagatccataaaccaacttcacaatcactgccaaacaaaaataaatagtagcacaataatgtacaaaaaaaaatctaggagccaccaacaccagcttaaaattagcgggaagcagaaagaggacatttgcacaacaacactgcaatttatctgttacattaatttctgatgatacatatatagcatctcaatcctgaaacgggcgacaccttgaaggcagcagtgcacaaggtatatcacgttgatttcagtaattcaaggatttctctctagggtttgtgttggtcaaaaatagccacaagaacaaatgcacacaagttttcggtaaattttggcatcgaccattgaggtatccattgtttcaattgcttgtccggcgtggagggctggctattaggattgcgctgggtattcagaaacgagctaatattgatcagttttgctagaactcatctagatgagacataatttggtctcattcaccttttatagccattggatgtgatgctataagatgcgtgtgtgctgacgtgggttgtatttgtttttattttcaaagtgaatgagaccaaattatatctcatctagatgagttct

SEQ ID NO: 108 - protein, 195 aa, Triticum aestivum
MNCLLWFFYGLPIVHPNSTLVLTINGIGLVIEGAYIIIFIIYAAKNTRWKMLGVLALEAAFVAAVVAGVLLGAHTHEKRSMIVGILCVIFGSIMYASPLTIMGKVIRTKSVEYMPFFLSLVNFLSGCCWTAYALIKFDIYITIPNALGTIFGLIQLILYFYYYRSTPKKGKNVELPTVLTKNAITSGIVSVTIEK

SEQ ID NO: 109 - DNA, 588 bp, Triticum aestivum
  source 1..588: mol_type = unassigned DNA
atgaactgcctgctctggttcttttatgggctccccatcgtccaccccaacagcaccctcgtcctcaccatcaacggcatcggcctcgtcattgagggtgcctacatcatcatcttcatcatctacgcggccaagaacacaaggtggaagatgctgggcgtgctcgccctcgaggcggcgttcgtggctgccgtggtggccggcgtgctcctcggtgcccacacccatgagaagcgctccatgatcgtaggcatcctctgcgtcatcttcggctccatcatgtatgcctccccgctcaccatcatgggtaaagtgatcaggaccaagagtgtggagtacatgccattcttcctgtcgctggtgaacttcctcagtggctgctgctggacggcctatgcgcttatcaagtttgacatctacatcacgatccccaatgctctcggtacaatctttggtctcatccagctgatcctgtacttctactactacagatcgacccccaagaagggcaagaatgttgaactgcccactgtcctcaccaaaaacgccattaccagcggcattgtctccgtcaccatagagaaataa

SEQ ID NO: 110 - DNA, 4339 bp, Triticum aestivum
  source 1..4339: mol_type = unassigned DNA
taccgccatcgttcgatctggaagaccagatcttagggtttaccccaagtagcacgagtgggtcgacaacagttacacgacgatgccttcatcaaggtaacggcgcaaatggcagccatcgcccgccaagtgctcggttttcaccggcaactatgtgttcccgactcgcaaccggagcaagatgacagatctggagatatgaccatctagcgtcaggccgaccacatacgacggaggagatggccaccaccgccggctgcaccggtgagatcagatctgaccggacgcgccgctgaccagatcaccatggcctccacgccgtcgcgccgatccaacgaatgatggcacaccgaccgcagccgccgcccttcacggtataggcccgcgccgcgcctgcagctgccaccgcccgaggcagggtggccaccacactgccgcaaccatcaagaccgcgccgcaatgtggatcggccgctgagctcgcatcataggcggcgccaccgcgccgcgcatgcctcctcgcgatatggccgtctcgcatcggccgtgatgctcgaagggtggagaagccccgccgccgccctgccgtcccggctttgcctagcggcactgcggacggtggcgaggagaggggaggggcgggtggggtcgagtggcggcggctaaaacgcggttaagagtttggtttttttagaataaaaattgaggggggcgatggcggagcgacgtaactaaatgaaacaaaactacttacgtactccactttaatagtagaaagataatggtatattactccctccttcgcatatagcgttaaaaacactcttatattatgagatccagggagtagagcacgaacaacacttcacggcatccggtaacacgcgtgttgggcttccggagtcgttgggacgactgggtctgtcttgggctttgcagtgtccttgggtgacgccggctgggttggtgttggtccgtgacaatttcgcgctcagggttgtccttgggtgacgacgcgggcgaggaagaaattgacacggccggccgttggatgggagcacggccggagaaggagttggatgaggactgcaccaaaatcaaaccgtttaacctacccttaaccatatccacatcgcatataacttggggaaggagacagggaaccgcctactatataagctcagccacccacgccccaaacaaatcacaaccaaccttactcaagtcgttagttccccgagcaatcgagttgtgtttccggcgatcgatcgatctaggtgagcatcatggtttccgccaacgtggcccgcaacatcgtcggcatcataggcaatgtcatctccttcggcctcttcctctcccctgtgtaagtcctctcctcctcctctcgtctagtctgtatctgtatgtatgcatatatgaaaggtggttgctgggcattaatctgaggctcgttttctaattgtacgtacgtacgcaggccgacgttctggcggatctacaaggccaaggacgtggaggagttcaagccggacccctagctggcgacgctcatgaactgcctgctctggttcttttatgggctccccatcgtccaccccaacagcaccctcgtcctcaccatcaacggcatcggcctcgtcattgagggtgcctacatcatcatcttcatcatctacgcggccaagaacacaagggtacgtgcaaccctcccaatgcctcctcaatcctcatccgtcccactgtctcttttcagctttagtttctgtacagaagatcctccagctcctaacccaagccatgtgcatgtgctctgctgtgtgtgcagtggaagatgctgggcgtgctcgccctcgaggcggcgttcgtggctgccgtggtggccggcgtgctcctcggtgcccacacccatgagaagcgctccatgatcgtaggcatcctctgcgtcatcttcggctccatcatgtatgcctccccgctcaccatcatggtacgtacaccatcccaacttaagggtcgtcgacccgtgatctttgataaccgctttaacttgttagttcaggttggctaattaattaatctgcattgtgcacgcatggtgtggtaatgatgcgttttcaagaaaaatacctgcctataatttatttttaaagttctagtggatgcttttgacagaccttaatttgttaagtagtacaccttgtttgttgttgattctgcctgaaaatctatgtccatctaaaagatgcacccacctttcaccttttaacgttcgtgccaaaaccctgttataaaaagtacgaattgagttgttcacctctcaagcacccaagttcttctacaatatgctacatcataatttttaatcaaaaaagcctaagttttatttctacctcaaaggtaaacttcctttacagggtgaattactagctcaggctaattgctaattacggatgcttttgccaacttatgagtgtactaatacaaatataactcaaaaagttaagatgaaagtagtaatattgtactgcctatttgcagggtaaagtgatcaggaccaagagtgtggagtacatgccattcttcctgtcgctggtgaacttcctcagtggctgctgctggacggcctatgcgcttatcaagtttgacatctacatcacggtttgtacatacacatacacattggaaataagaagtcgcaaacccagccaaacatacaatcaagaaatcctcagcgcggattgatctaacgtttatgtcctctttaaattctgtgcagatccccaatgctctcggtacaatctttggtctcatccagctgatcctgtacttctactactacagatcgacccccaagaagggcaagaatgttgaactgcccactgtcctcaccaaaaacgccattaccagcggcattgtctccgtcaccatagagaaataaacgtggcttcgttttttagccctaatgattttgagttgttaataccggatgatacttcaacaacaacaagttgatgttaattagtactactttttgttagctagtagagtctgagatcacctttaatttcgtgaaccattgtcgtctgtccgggactactagtgcaaattacaagtgtatataaataccaatccagctgagttatcccagagatatattatgacaccatgtatgcttgcctgttctcaatctgctcctacgtgatgatacgattgaatttttaattacagcatgcgatggctttgttaaattttaaattattcaatatccatgatgtgtttgtattatgtttcgggcaaggtcctattttgttttctgcgcaaaaacacccaatgggcatcttattggtgatgcaacttttgaacccggtgtgagaaaaaaaggagaaggacttaacctaattaccggtttagttggatggctcctgctcttttcccgtgacgctgccttgttaccacatcgacaggcaacgagcagctctgcagcttggtcaagtatgacgcttttttctgaatcttgtaacatgttaattgtttgtcatatatatttcaaagcagtgtgtttaatcgcatggtgtctactgtatatatagacacacttctttgtcaagaaaaaatagttgagtataggaagagctacgctcaaattagatagcccaccaacttgtggctctaactattaagacaccagccctttctcacaaatttttattaagggaaataaaaataacatccaacttgaagcaacatccaaactagcagcccaggctagctaaacacatcaaccatagactacatactgtgttttaatatccaagagcaaggtttttttatcaatttattttctttgtattcgaatgatcacgagtcatctagcgattattactatatgaatctagttagattctgtttgatcaacgataacttattataatttgttaggttttgttcctggatcatcattatgtctactagaattaggaaacatgattttggtgctgcaaaacaaagactggatcttgaggctcgaactcaaacaagtgccctcgatagatatttagtgagcctgccaacttgattcggaaaatcaaactgcagatgttaatgttgatgatggtggtgatgataatacgatggtggttgtggaacatgatgcagaaattgatgtcttggagatatgatataggacgaagatatgattgaagattatattccaagaaatactagacagatggtcctttttggtagaacatgaagtttgttcattgctttcctatcacattacaatttgagcataatatctgatatatggttaaataaggtacaaataaaacagactg

SEQ ID NO: 111 - protein, 247 aa, Triticum aestivum
MVSADAARNIVGIVGNVISFGLFLSPVPTFWRIIKAKDVEEFKPDPYLATLLNCMLWVFYGLPIVHPNSILVVTINGIGLVIESAYLIIFFIYATRNTRLKMLGVLAVEALFMVAVVAGVLLGAHTHEKRSMIVGILCVIFGSVMYASPLTIMGKVIKTRSVEYMPFVLSLVNFLNGCCWTAYALIKFDLYITIPNGLGAVFGLAQLILYGCYYRSTPKKGKNVELPTVKVTKNSVGGGRVSVTVEK

SEQ ID NO: 112 - DNA, 744 bp, Triticum aestivum
  source 1..744: mol_type = unassigned DNA
atggtttccgccgacgccgcccgcaacatcgtcggcatcgtcggcaatgtcatctccttcgggctcttcctctcccctgtgccgacgttctggcggatcatcaaggccaaggacgtggaggagttcaagccggacccctacctggcgacgctgctcaactgcatgctctgggtcttctacggcctccccatcgtccaccccaacagcatcctcgtcgtcaccatcaacgggatcgggctcgtcatcgagagcgcctacctcatcatattcttcatctacgccaccaggaacacacggttgaagatgctcggcgtgctcgccgtcgaggccttgttcatggtggccgtggtggccggcgtgctcctcggcgcccacacccacgagaagcgctccatgatcgtcggcatcctctgcgtcatcttcggctcggtcatgtacgcctccccgctcaccatcatgggtaaagtgatcaagaccaggagcgtggagtacatgccattcgtcctctccctggtgaacttcctcaacggctgctgctggacggcctatgcgctcatcaagttcgacctctacatcacgatccccaatggactcggtgccgtctttggcctcgcccagctgatcctctacggctgctactacaggtcgactcccaagaaggggaagaatgtcgagctgcctaccgtcaaagtcacaaagaacagcgttggcggcggcagggtctccgtcaccgttgagaaataa

SEQ ID NO: 113 - DNA, 4769 bp, Triticum aestivum
  misc_difference 1624: note = a, c, t, g, unknown or other
  source 1..4769: mol_type = unassigned DNA
tcaaggtaacggcgtagaacgccgccatcgcctgccaacggctcgattttcaccggcaaccatgtctccccaactcgcagccgggactagatgatggatctcgagatccgatcaccaagtctttggccggcccttctatctatctggcacgagaaccatgcagaggccggacatgtgcttatagtgattgtattcttttaatgcaatattatgagtcaataaaatccgctctttatcaaaaaatctatttggcacgagaaaagaatttatgcacggtgagcattgcttcagattgtctttcattggtgcaacacctcatacatactcaagaccgctcatctgttggtgcagtggtggtggacattaggcatgtagcattcgacttcgacttgtggtctagaatcacaattgtcggcatattaatgttcctgcttatttgttagctaaatcttatttgagctctatagtagtctttgtgttattctttctgctccggggtgtatctaaaagactatgtaatttgtttacttaattaataaaaaagagtatgtcgatgtttttataaaaaaatcgataatatgttcggattttaagcatggcaacccagacgttttgattttaagcatggcaacccgacaatttttcatgacaactttagaaaatcgccatgttttaccaactaaacttaccacctcgcgccaactaaagttgttatgaaaacgttcaggctgtcatgcttaaagtccgaaagtttgggatttactgggtcagaaaaatgtgcatacatttttagcaattccttgacgtcctgtgagaaagctacttgcttcgaagtagtattatcatctcatagcgaagccgggagcttgaatacactgtgacgcgagcacggcgtccagtcaggatggcaggttactcggttcgttggacttcaactccgatcgaaatttgaacggaggaagagtaactaactcttaaccatatcgtataagagatttaaccaccttccataatatgtttggatttcttccggtacgacaattccagttgaacttggaccgtagggaatatctaactcctaaccatattagagcttacctccatttgtcaaacaaacaaacaaaatcgtagtttacctccacgtcaggaaagccatatccgatagtaactccttacttggggaggacgaacccgccacccacgactatataagctctgcccggcctcccagcttcgatcaccccaaatccccattccccaagtcgtttcctccagtcgagctgtgttcccggcgatcaagatagcaagatggtttccgccgacgccgcccgcaacatcggtcggcatcgtcggcaatgtcatctccttcgggctcttcctctcccctgtgtaagccgccaccctcctcctctcatcccgccgccgccctccgccctccgctggtccaatctaatctatgcatggaaggtggttgccggtgacaaccggggtatggatctgatgcttgtctgtgcaggccgacgttctggcggatcatcaaggccaaggacgtggaggagttcaagccggacccctacctggcgacgctgctcaactgcatgctctgggtcttctacggcctccnatctgatgcttgtctgtgcaggccgacgttctggcggatcatcaaggccaaggacgtggaggagttcaagccggacccctacctggcgacgctgctcaactgcatgctctgggtcttctacggcctccccatcgtccaccccaacagcatcctcgtcgtcaccatcaacgggatcgggctcgtcatcgagagcgcctacctcatcatattcttcatctacgccaccaggaacacacgggtacgtagtagtattgtctcttttcggcgttcatttctctatgtatacaagatctgcccctagctaacccatgcatgccaatgcgcgcgtgcagttgaagatgctcggcgtgctcgccgtcgaggccttgttcatggtggccgtggtggccggcgtgctcctcggcgcccacacccacgagaagcgctccatgatcgtcggcatcctctgcgtcatcttcggctcggtcatgtacgcctccccgctcaccatcatggtacgtgctcgatccatcgcttgatccactcttcaatcctcgatccgtttgtttctatttctatatacggcggcgttgtttactttggaatacaattgatgggaaaggataatgtacacacaccttcctattttaagcatcgtatcaaacctgtctaaacaaacgtgctgcctttttggccaaatcgtcatgatcttcacacaccaagttctttgacaagatgttgccttgcatgcttaattatatgttaggtcaaaacgcatacagtttattcaccacaataggcaacacacagcccgtacgtgtcgtctacttatgtatctgtacttgcatcccgtgtagccagccaaccatgctttctgttgctctcgccaaactcgcgtgttggctgttgagtgacgggaaggatcggaaagaacggttcacgatctaactaaaacctgtgacgatctagcacttcatcagatatgtgtgatgcctagggatgcatgcatatagtgttgtgatctttgcatcttgtgacccttcccttttgccaactctttgaggtggtgatatcctaattaatggaaaaggatacggtaccagccatcaacattggctccatcccgtgggtcatgtggtccaggtgtagagttcaacaatatatagctgctgttaattatccagtgaatatgtttcctcgttaatctacacggtatatatttaatgagacgtgtgcttttacttgctggtgaacgtaatattgtgctgcttgcagggtaaagtgatcaagaccaggagcgtggagtacatgccattcgtcctctccctggtgaacttcctcaacggctgctgctggacggcctatgcgctcatcaagttcgacctctacatcacggtcagtactacaatcgcatcttcgaaacgccagagaaacgagaactccatgcatcgatctaactatcttttgattccgtgcagatccccaatggactcggtgccgtctttggcctcgcccagctgatcctctacggctgctactacaggtcgactcccaagaaggggaagaatgtcgagctgcctaccgtcaaagtcacaaagaacagcgttggcggcggcagggtctccgtcaccgttgagaaataagcttggcttgcagcagtaggcccgccgtcgccaagtgatccaatcaagctggcggcagagatttttagcccgtgatattctgagtagtagttaatttagcacaagatattttgagttagttaattccggatgatggtgccggtatctgttagatagtttgagtgtgcctgtcctttagtttcgtgaaacattctcgtctgccctagtgcaaattcgaagtaactatatactccaattgcaaactatactatatatgggcctgcgtgatatgcatgatatggattgttaattatggcgtgttatgataaaatcaacctttggttggaccggccaacatgaagtgtggtgattaagtattttctaggagtgttatttttgcataatcacatctgctatcttccatccctcaaaaaaaaaaaaaactgctatctcccatagaagcgtgcatacagtctacaaccagcaccttgaatgatttgttgctaaaaaacgataattatgcaaaacaagatttaagccaatagttgtagcaatacacttgagcgtgaaactactcccatcttgttgctcttgctcagacgttcaaaaactgagacctctttattacatgtatatgtttcccttacaatatgatcatctgtccaagctcttttcacaacatgatcttcttctctgagcccgagacttccactaaaaaactcttcatcccatggactagccgatcagaggcatttcagtaataaacccatacagatctttgttgcgttgataaatgatttaatcgaacagggataatatgcttaaagccaaaggtggcaagttggtttaaacccctcttggatggttccttctttagtacagtgagtagttttataaaaatagcactataacatgctgtgcacctgttggagtagaaaggtttgatgtgtagcggcgcgagttaaaagcaaaaaaaagaaagaaaaaaaaaacaccacatttggggtttcacttgcgaaaaactacttggttcctaattatttttaaaagtcaccgcgcattcagtaaacattttgcaaaaagcactgattgagagttttgtctcatttaatcattttctgacaaatgggaccggagtttaaggagtaaactaacaaaaacaattacatagacacccatgaaactaaaatagaaaagcaatccggcctatccctgctccctatccgatcggaggaggcagttctcgtcactcccgtcaccaccaccggatcccgttgtcgctatcggaagcccgtcgccggaagctccgctgtgctcccggagctccccccggctcccgtcacccccactgtctcctgtcgccgttgttagaagctccacccggccttgccgctgtgttgccggagttgcgccgaccgttgagcggtccaccttgcttcctactgctacctgctctcctcgtccttgccatcgcaacagccggccgtgcacctggctcgtccgggcactagcggtgagcagcagcccgggcaccagcggcgagc

SEQ ID NO: 114 - protein, 247 aa, Triticum aestivum
MVSTDAARNIVGIVGNVISFGLFLSPVPTFWRIIKAKDVEEFKPDPYLATLLNCMLWVFYGLPIVHPNSILVVTINGIGLVIESAYLIIFFIYATRNTRLKMLGVLTAEALFMVAVVAGVLLGAHTHEKRSMIVGILCVIFGSVMYASPLTIMGKVIKTRSVEYMPFVLSLVNFLNGCCWTGYALIKFDLYITIPNGLGAIFGLAQLILYGCYYRSTPKKGKNVELPTVKVTKNSVGGGRVSVTVEK

SEQ ID NO: 115 - DNA, 744 bp, Triticum aestivum
  source 1..744: mol_type = unassigned DNA
atggtttccaccgacgccgcccgcaacatcgtcggcatcgtcggcaatgtcatctccttcgggctcttcctctcccctgtgccgacgttctggcggatcatcaaggccaaggacgtggaggagttcaagccggacccctacctggcgacgctgctcaactgcatgctctgggtcttctacggcctccccatcgtccaccccaacagcatcctcgtcgtcaccatcaacgggatcgggctcgtcatcgagagcgcctacctcatcatcttcttcatctacgccaccaggaacacacggctgaagatgctcggcgtgctcaccgccgaggccttgttcatggtggccgtggtggccggcgtgctccttggcgcccacacccacgagaagcgctccatgatcgtcggcatcctctgcgtcatattcggctcggtcatgtacgcctccccgctcaccatcatgggtaaagtgatcaagaccaggagcgtggagtacatgccattcgtcctctccctggtgaacttcctcaacggctgctgctggacgggctatgccctcatcaagttcgacctctacatcacgatccccaatggcctcggtgcaatcttcggcctcgcccagctgatcctctacggatgctactacaggtcgactcccaagaaggggaagaatgtcgagctgcctaccgtcaaagtcacaaagaacagcgttggcggcggcagggtctcggtcaccgttgagaaataa

SEQ ID NO: 116 - DNA, 4717 bp, Triticum aestivum
  misc_difference 1548: note = a, c, t, g, unknown or other
  source 1..4717: mol_type = unassigned DNA
tctctagatcattattacccagagatactcctaattggttcggattttgcacaatctcatcactggtaaaatgcaaaatagaattaaatttgttaacagacataccagtagaaagctcgacgtcacgcagcttggccgccctcagcgcgcacctgagctgcatgtcatcaacatccggctgctcctgcagtctcccgctgacccgtctccctgcagagacaggatccgggatcccaccgaaagtgatgacctcctcgcgagaagctgcgctaggggaagagcctcctgcccgtcccccaatagcggtgaccagcgccgggtccaccggagcctcgtccaacggcgatgagagctcgcagggcctatgggctgccaccccgccgacgcccgcgaccggtaaactcagcctagcgcggtccagggagtccggtgacgcagcaaccgaaccatccagcccgccctccagagcaaccgaagtggaaacgacggcctcctgcgcgcccgctccccctcgaaccggcgacctcaccaaggggggctcgccgacccttggggccgccagcatcaaggtctcagagggccgaacctcctgctggccctctcctcccaaaaccaccggcttggccgcctcagcctgtgtcgaaggagaggacacaaccgatagcgggccatcctgccctgaagcacctccgccatcagcagatctcgacacccgcatactgggcgccatggacgcagaacggaccctgtcacacaacaccctcggcggagccgagaatgctccaaaagagccaaactgaagagcggtagtcggaactgtcctggaagtcccaacaggggcggagtcaccattatccgactgccccgaaggccccttaaccttatcatcatcactcttagctgtatcatcctggttccccgaaccccctccgccctcagaagtgatcatattatcgtatataagagatttaaccaccttccataatctgtttggatttcttccggtacgacaattccagatgaacttggaccgtagggaatatctaactcctaaccatatcagagtttacctccattcgtcaaaaaaaaaatcgtggtttacctccacgtcaggaaagccatatccgatagcaactccttacttggggaggacgaacccgccccccacgactatataagctctgcccggcctccctgtttcgatcaccccgaaccccattccccattccccaagtcgtttcctctagtcgagctgtgttcccggcgatcaagatagcaagatggtttccaccgacgccgcccgcaacatcgtcggcatcgtcggcaatgtcatctccttcgggctcttcctctcccctgtgtaagcctccaccctcttcctctcatcccgtcgccgccgccctccgctggtctaatctaatctgatgcttgtctgtgcaggccgacgttctggcggatcatcaaggccaaggacgtggaggagttcaagccggacccctacctggcgacgctgctcaactgcatgctctgggtcttctacggcctccncttgtctgtgcaggccgacgttctggcggatcatcaaggccaaggacgtggaggagttcaagccggacccctacctggcgacgctgctcaactgcatgctctgggtcttctacggcctccccatcgtccaccccaacagcatcctcgtcgtcaccatcaacgggatcgggctcgtcatcgagagcgcctacctcatcatcttcttcatctacgccaccaggaacacacgggtacgtagtagtactgtctcttttcggcgttcatttctgtatgtatacaagatctgcccctagctaacccatgcatgcccgtgcgtgcgcaagtgcagctgaagatgctcggcgtgctcaccgccgaggccttgttcatggtggccgtggtggccggcgtgctccttggcgcccacacccacgagaagcgctccatgatcgtcggcatcctctgcgtcatattcggctcggtcatgtacgcctccccgctcaccatcatggtacgtggtcgatccatcgcttgatccactcatcaatcctcgatccgtttgtttctatttctatatacggcggcgttgtttactttggaatacaattaatggaaaaggataaggtacacgcaccttcctattttaagcatcctatcaaacctgtctaaacaaacttgctgcctttctggccaaatcgtcatgatcttcgcacacccaagttcttttacatgatgttgccttgcatgcatatatgttaggtcaaaaagcatacagtttattcaccacaataggcaacacacagcccatacgtgtcctctgcttatatatctgtacttgcatcccgtgtagccagccaaccatgcatgctttctgttgctctcgccaaactctcgtgttggctgttgagtgacgggaaggatcggaaagaacggttcacgatctaactaaaaactttcatctagcacttcatcagatatgtgtgatgcctagggatgcatgcatatagtgttgtaatctttgcatcttgtggtccttcccttttgccaactctatgaggtgatgatgttgtaattaatggaaaaggatacggtaccagccagaacattggctccatcccgtgggtcatgggtccaggtggtagagttcaacaatactccagttaattagccagtgaataagtttctcattaatctataccatatacactttatgagacgtgtgcttttactaattaactggtgaacgttatattgtgctgcttgcagggtaaagtgatcaagaccaggagcgtggagtacatgccattcgtcctctccctggtgaacttcctcaacggctgctgctggacgggctatgccctcatcaagttcgacctctacatcacggtcagtactacaatcgcatcttcgaagcgccagagaaacgataactccctgcatcgatctaactacaatgtcctcttttcattccgtgcagatccccaatggcctcggtgcaatcttcggcctcgcccagctgatcctctacggatgctactacaggtcgactcccaagaaggggaagaatgtcgagctgcctaccgtcaaagtcacaaagaacagcgttggcggcggcagggtctcggtcaccgttgagaaataagcttggcttgcagcagcaggccaaccgtcgccaagtgatctaatcaagccggcggcagagaattttagcccgtggtattttgggtagtagttaatttagcacaagatattttgagtagttaattccggatgatggtgctggtatctgttagatagtttgagtgtgcctgtcctttagtttcttgaaacattgtcgtctgccctagtgcaaattcgaagtaactatacactccaattgcaaattataaatatatatgtgcctgagttatcgccatgtttgtcacgcgatctctcatacttttgcgtgatatgcatgatatggcgtgtacgataaaatcgacctttggttggaccggccaacatgacatgcggtgattaagtattttctaggactgttctttttgttgggcctcattgtatctgggtttatccctggcacttggaatccataatcacatctgctatcttccacccctcaaaaaaaaaaatctgctatctcccatagaagcgtgcatacagtctacaagcagcaccttggatgacttgttgctaaaaaacgataattatgcaaaacaagatttaagccaatagttgtagcaatacacttgagggtgaaactactaccatcttgttgtaaatacgttgttgctcttgttcagacattcaaaaattgggacctctttattacatgtatatgtttccattacaatatgatcatttgtccaagctcttttcacaacatgatcttcttctctgagcccaaaaccttcactaaaaaactcttcatcctatggactagcccatcagaggcatttcagtaataaacccatatacagatcttcgttgtgttgataaacgatctaatccaacataaataacatgcttaaaaccaaaggtggcaagttggtttaaacctcattactgccatccgcttctccccatccccttaccgctctcactcccttctccccatccccttaaagcatctccagccgttcggccccccagagcgtcaaaaaagagcggtctggggacgaaccggcgctagattggcccctggggttcggttcgctcccagtcataggcccacggtcgccgcgagttcggcgaagttcgtttcatattttttgcaaactcggcgacttttgcaggaactcggccatacttcgtcaaaatttgtacaaacatgcaagaactacgcctaacttaaaaaacaactaaaaagtctagtcgccgccgtcgccgccgccgtcgtctacatgccgagaagcgggtgtagtcgtcgtcgtcatcgtcgccgccgcgcgcctcgcctgcggcgtccctgctacagccctggtcggggtctccgacacgtggtggggcgcttgacggcccggcctcgccctcgtcgtcgctgtcgatgacaataacgccgccctcctcggcgcggctacgggcctgggtctccaggtacgcccggcgctggcggcgcacctgctcgcggacgtagtcctccttcgcccatttgagggcggactcgtcgtcgggggccaccatgtcgacgtga

SEQ ID NO: 117 - protein, 247 aa, Triticum aestivum
MVSADAARNIVGIVGNVISFGLFLSPVPTFWRIIKAKDVEEFKPDPYLATLLNCMLWVFYGLPIVHPNSILVVTINGIGLVIESAYLIIFFIYATRNTRLKMLGVLAVEALFMVGVVAGVLLGAHTHEKRSMIVGILCVIFGSVMYASPLTIMGKVIKTRSVEYMPFVLSLVNFLNGCCWTGYALIKFDLYITIPNGLGAVFGLAQLILYGCYYRSTPKKGKNVELPTVKVTKNSVGGGRVSVTVEK

SEQ ID NO: 118 - DNA, 744 bp, Triticum aestivum
  source 1..744: mol_type = unassigned DNA
atggtttccgccgacgccgcccgcaacatcgtcggcatcgtcggcaatgtcatctccttcgggctcttcctctcccctgtgccgacgttctggcggatcatcaaggccaaggacgtggaggagttcaagccggacccctacctggcgaccctgctcaactgcatgctctgggtcttctatggcctccccatcgtccaccccaacagcatcctcgtcgtcaccatcaacgggatcgggctcgtcatcgagagcgcctacctcatcatcttcttcatctacgccaccaggaacacacggctgaagatgctcggcgtgctcgccgtcgaggccctgttcatggtgggcgtggtggccggcgtgctcctcggcgcccacacccacgagaagcgctccatgatcgtcggcatcctctgcgtcatcttcggctcggtcatgtacgcctccccgctcaccatcatgggtaaagtgatcaagactaggagcgtggagtacatgccattcgtcctctccctagtgaacttcctcaacggctgctgctggacgggctatgcgctcatcaagttcgacctctacatcacgatccccaatggcctcggtgccgtctttggcctcgcccagctgatcctctacggctgctactacaggtcgactcccaagaagggcaagaatgtcgagctgcctaccgtcaaagtcacaaagaacagcgttggcggcggcagggtctccgtcaccgttgagaaataa

SEQ ID NO: 119 - DNA, 4608 bp, Triticum aestivum
  source 1..4608: mol_type = unassigned DNA
ggtacaagtttacaaggctggttgcacgtatataaatagcactagcagctaactagaccaatcttactcggaggctagctccagcactattcggatacgtacatacattagcaacttggacacgtatcaatattgggaggttgtgttcgtgtttaattccaacagaggtgagcaggcaggcggcggcgctggcctccccatggcacggagctgagcaagcatgcggcggcgctccccatggcgtggtggtggccggctctggcgccggcggccgtggctgcgggcagccgtggtggtgccggccatggctggggaaagacatcagggaagaagatggagaaaagaaaaataagggagagagagagtgggcgcttacatatgggacccatatgtacattaacggttaaacaaacagtcaataaacggtttgtttagaagggcccaacatgtcataaaccggattaattctaaattgcatgatcatttgggttttttagaacagcgaaccaaaaaatttgtaggtttttgaaatatcatgaaaggtgatagttttttattgacctagcctataatgtggtagttttttgctatatactcgagaaaacaccgagcgcaaaaaaacgctattttgattatgtataattattttagcgcgccgcgcaaccccgcgctttttggagatgctcttaagcaattggttagagatgctcttacgttgttgggagagctcgtgcaacgtacgtgcatttttagcaatcccttgccgtcgcatgatagagctcgtgcaaactttcttcgaagtatatcatctcatagcgaagccgggagcttgaatacactcgtgacgcgagcacggcgtccagtcaggatcgcaggttgctcagttcgttggacttcaactccgatcgaaatttgaacggaggaagagtaaccaactcttaaccatatcgtataagagatttaaccaccttccataatctgtttggatttcttccggtacgacaattcatgttgaacttggaccgtagggaatatctaactcctagccatatcagagcttacctccatttgtcaaacaaacaaaaaaaatcgtattttacctccacgtcaggaaagccatatccgatagtaactccttacttggggaggacgaacccgccacccacgactatataagctctgcccggcctccctgtttcaatcaccccgaaccccattccccattccccattccccattccccattccccaagtcgtttcctccagtcgagctgtgttcccggcgatcaagatagcaagatggtttccgccgacgccgcccgcaacatcgtcggcatcgtcggcaatgtcatctccttcgggctcttcctctcccctgtgtaagccgccaccctcctctcgtcccgctgccgccgcccgccgctggtctaatctaatctatgcatggaaagtagttgccggtaacaactggggtatggatctgatgcttgtctgtgcaggccgacgttctggcggatcatcaaggccaaggacgtggaggagttcaagccggacccctacctggcgaccctgctcaactgcatgctctgggtcttctatggcctccccatcgtccaccccaacagcatcctcgtcgtcaccatcaacgggatcgggctcgtcatcgagagcgcctacctcatcatcttcttcatctacgccaccaggaacacacgggtacgtagtatttctgtctcttttcggcgttcatttctgtatgtatacaagatcagcccctagctaacccatgcatgcccgtgcgtgcgcaagtgcagctgaagatgctcggcgtgctcgccgtcgaggccctgttcatggtgggcgtggtggccggcgtgctcctcggcgcccacacccacgagaagcgctccatgatcgtcggcatcctctgcgtcatcttcggctcggtcatgtacgcctccccgctcaccatcatggtacgtgctcgatccatcgcttgatccactcttcaatcctcgatccgtttgtttctatttctatatacggcggcgttgtttactttggaatacaattaatgggaaaggataatgtacacgcaccttcctattttaagcatcgtatcaaacctgtctaaacaaacgtgctgcctttttggacaaatcgtcatgatcttcacacacccaatttcttttacatgatgctgccttgcatgtatgttaggtcaaaaagcatacagtttattcaccacaataggtatcacacagcccagacgtgtcctctgcttatgtatatttgcatcccgtgtagccagccaaccatgctttctgttgctctcgccaaactctcgtgttggctgttgagtgacgggaaggatcggaaagaacggttcacgacctgtgatctagcacttcatcagatatgtgtgatgcctagggatgggatgcatgcctatagtgttgtaatctttgcatcttgtgatccttcccttttgcaactctatgaggtgatgatatccttattaatgagaaagggatacggtaccagccaccaacattggctccatcccgtgggtcatgcagtccaggtgtagagctcaacaatatatggctgctgttaattagccagtgaatatgtttcctcattaatctataccatatatatacttaatgagacgtgtgcttttactaactggtgaacgtaatattgtgctgcttgcagggtaaagtgatcaagactaggagcgtggagtacatgccattcgtcctctccctagtgaacttcctcaacggctgctgctggacgggctatgcgctcatcaagttcgacctctacatcacggtcagtactacaatcgcatcttcgaaacgccagagaaacgatatctccatgcatcgatctaactatcttttgattccgtgcagatccccaatggcctcggtgccgtctttggcctcgcccagctgatcctctacggctgctactacaggtcgactcccaagaagggcaagaatgtcgagctgcctaccgtcaaagtcacaaagaacagcgttggcggcggcagggtctccgtcaccgttgagaaataagcttggcttgcagcagcaggcccgccgtcgccaagtgatccaatcaagcctgcggcagagatttttagcccgtgatattttgagtagtagttaatttagcacaagatattttgagtagttaattccggatgatggtgccggtatctgttagatagtttgagtgtgcctgttctttagtttcgtgaaacattctcgtctgccctagtgcaaattcgaagtaactatatactccaattgcaaattatactatatatgtgcctgcgtgatatgcatgatatggattgttaattatggcatgttacgataaaatcgacctttggttggaccggccaacatgaagtgtggtgattaagtattttctaggagtgttctttttgttgggcctcattgtatctgggtttatccctggcacttggagtccataattacatctgctatcttccatccctaaaaaaaaatctgctatctcccatagaagcgtgcatacagtctacaaccagcaccttgaatgatttgttgctaaaaaacgataattatgcaaaacaagatttaagccaatagttgtagcaatacacttgagcgtgaaactactcccatcttgttgctcttgctcagacgttcaaaaactgagacctctttattacatgtatatgtttcccttacaatatgatcctttgtccaagctcttttcacaacatgatcttcttctctgagcccgagacttccactaaaaaactcttcatcccatggactagccgatcagaggcatttcagtaataaacccatacagatctttgttgcgttgataaatgatttataatcgagcagggataatatgcttaaaaccaaaggtggcaagttggtttaaacccctcttggatggttccttctttagtatagtgagtagttttatattggaataaaaatggcactataacatgctgtgcacctgttggagtagaaaggtttgatgtgtggcggtgcgagttaaaagcaaaaaaccaccacatttggggcttcacttgcgaaaaactacttggttcctagttattttcaaaagtcaccgcgcattcagtaaatattttgcaaaaagcactgattgggggttttgtctcatttgatcactttctgacaagtgggactggagtttaaggagtaaactaacaaaaacaattacatagacgcccatgaaactaaaatagaaaagcaatccggcctatccctgctccctatccgatcggaggaggcagttctcgccactcccgtcaccaccatcggatcccgttgtcgctgccggaagcccgtcgccggaagctccgcccagccctgtcgctgtgctcccggagctccccccggctcctgtcacccccaccggctcccgtcgccgttgttagaagctccacccggccttgccgctgtgttgcctgagttgcgccgaccgttgagcagtctgcctcgcttcctactgctgcctgctctcctcgtccttgccatggcaacagctggccgtgcacttggctcg

SEQ ID NO: 120 - protein, 588 aa, Triticum aestivum
MPSSPAQMALGRARSPALVLAAAVLGALCVVALSEDEQLENLRFVQHAQDAPLVSHYNYIVVGGGTSGCPLAATLSEHSRVLLLERGGLPYRNMSNQEHFTDALADTSLASPAQRFVSTDGVVNARARVLGGGSCLNAGFYTRASNEYVRTAGWDAGLVNSSYRWVERALVFRPDVPPWQAALRDALLEAGVTPDNGFTFDHVTGTKIGGTIFDNNGQRHTAADFLRHARPRGLTVVLYATVSRVLFRSQEGVPYPVAYGVVFADPLGVQHRVYLRDGGKNEVILSAGTLGSPQLLMLSGVGPQVHLEAHGIQVLVDQPMVGQGVADNPMNSVFIPSPVPVGLSLVQVVGITKSGSFIEGVSGSEFGIPVSDGARRLASFGLFSPQTGQLGTLPPGQRTPEALQRAAEAMRRLDRRAFRGGFILEKILGPVSTGHIELRSTDPRANPAVTFNYFQEAEDLERCVRGIQTIERVIQSRAFSNFTYANTTVESIFTDSANFPVNLLPRHVNDSRSPEQYCRETVMTIWHYHGGCHVGAVVDDNYRVFGVRGLRVIDSSTFRYSPGTNPQATVMMLGRYMGIKIQAERWRK

SEQ ID NO: 121 - DNA, 1767 bp, Triticum aestivum
  source 1..1767: mol_type = unassigned DNA
atgccgagctcgccggcgcaaatggcacttggccgcgcgagatcgccggcgctggtgctcgccgccgccgtccttggcgcgctctgcgtcgtcgcgctctcggaggatgagcaactggagaacctgcggttcgtgcagcacgcgcaggacgcgccgctggtgtcgcactacaactacatcgtggtgggcggcggcacgtccgggtgcccgctggcggcgacgctgtcggagcactcgcgggtgctgctgctggagcgcgggggcctcccctaccgcaacatgtccaaccaggagcacttcacggacgcgctggccgacacgtcgctggcgtccccggcgcagcggttcgtgtccacggacggcgtggtgaacgcgcgggcgcgggtgctgggcggcgggagctgcctcaacgccgggttctacacgcgggccagcaacgagtacgtgcgcacggccgggtgggacgccggcctcgtcaactcgtcgtaccggtgggtggagcgcgcgctggtgttccgcccggacgtgccgccgtggcaggccgcgctccgggacgcgctgctggaggccggcgtcacccccgacaacggcttcaccttcgaccacgtcacggggaccaagatcggcggcaccatcttcgacaacaacgggcagcgccacacggccgccgacttcctccggcacgcccggccgcgggggctcaccgtggtgctctacgccacggtgtcgcgggtcctgttcaggagccaggagggggtgccgtacccggtggcgtacggggtggtgttcgcggacccgctgggggtgcagcaccgggtgtacctccgggacgggggcaagaacgaggtgatcctgtcggcggggacgctggggagcccgcagctgctgatgctgagcggcgtgggcccgcaggtgcacctggaggcgcacggcatccaggtgctggtggaccagcccatggtcgggcagggcgtggccgacaaccccatgaactcggtcttcatcccgtcgccggtgccggtggggctgtccctggtgcaggtcgtcgggatcaccaagtccggcagcttcatcgagggcgtgagcggctccgagttcggcatcccggtgtccgacggcgcccgccggctggccagcttcgggctcttctccccgcagaccgggcaactcggcacgctgccgccggggcagaggacgccggaggcgctgcagcgcgcggcggaggcgatgcggcggctggacaggcgggcgttccggggcggcttcatcctggagaagatcctggggccggtgtcgacggggcacatcgagctgcgcagcaccgacccgcgcgccaacccggccgtgaccttcaactacttccaggaggcggaggacctggagcggtgcgtccgggggatccagacgatcgagcgggtgatccagtcgcgcgccttctccaacttcacctacgccaacaccaccgtggagtccatcttcaccgactcggccaacttccccgtcaacctgctgccgcgccacgtcaacgactcccgctcgccggagcagtactgcagggagaccgtcatgaccatctggcactaccacggcgggtgccacgtcggcgccgtcgtcgacgacaactaccgggtgttcggggtcagggggctcagggtcatcgacagctccaccttcaggtactcccccggcaccaacccgcaggccaccgtcatgatgctcggcaggtatatgggcataaagattcaggccgagagatggaggaaatga

SEQ ID NO: 122 - DNA, 4650 bp, Triticum aestivum
  source 1..4650: mol_type = unassigned DNA
tgaccacccgcggctggctccctggggcgctccgggccattgatctaggcagccgcctcgcacctggactgcttgcctctgggtccatgacgaggggtgcgggtgcagtcggatccatcgtgatgtggtgttttcggtcacaccagtttgtgccctcttgttgattgccctgtgcgtgatgggctgaccggatctgcctgttagtgttgtgttggccacccgcggctggctccttggggcgctccaggtcatcgatctaggcggtcgcctcgcacccggactgcttgcctctgggtccatgacgagaggatgcgggcgcggtcggatccatcatgatgtggtgttttcggtcacaccagtttgtgctctcttgttggttgtcctgcgcgtgatgggccgaccggatctgcctgtcagtgttgtgttggccacccgcggctggctccctggggcgctccgggctatcgatctaggcgtccgcctcgcacccggactgcttgcctctgggtccatgacaagggggtgcgggcgcggtcggatccatcatgatgtggtgttttcggtcacacaagtttatgccctcttgttggttgatctgcgcgtgatgggacgactagatctgcctgtcagtgttgtgttggccacccgcggctggctccatggggcgctccgcgccatcgatctagggggccgcctcgcatccagactgcttcaggaactgacatccgttcatttattttgtcagttcatttatttgaggcaaatttcttcaggaactgacatccgttccatggggcgtacgttggggattggtttctggcgaacgttcgccagattatctttaccgcttttttttagtttctaggtttttcttggtattttattattttcttatagtttggaccgatctcctcacgtcatagttttgccttggtacctgtaatatgtatttgtgcttgtatataaaaatggagggagtatagttttttcgggagaaatatagtgcacgcgcaaaaccgtctcaagatcggccagtaaaccctcccccttgctgcttcatcgcatttgatatgatatactcaacagctcctcccgtctaaaaagaaagttcatcacttctgcatttcacaaccgatgcattccatttgatataaccattccctttctatactgacacaagtttatggggctgttctttgcactgcaaccgcctccgcattatttaacacatctaccctcgatctacccgcgcgctaactcgaggtttataaaccaagcgaacttttcgcgtccctgaagcgcaaaggatgccgagctcgccggcgcaaatggcacttggccgcgcgagatcgccggcgctggtgctcgccgccgccgtccttggcgcgctctgcgtcgtcgcgctctcggaggatggtgcgtgtgttcggggttttgcatgtcagctagtacggagtacgtgcctgtgtctgttatcatgatcaatgaccgatggtggcgtgcgtgtgcagagcaactggagaacctgcggttcgtgcagcacgcgcaggacgcgccgctggtgtcgcactacaactacatcgtggtgggcggcggcacgtccgggtgcccgctggcggcgacgctgtcggagcactcgcgggtgctgctgctggagcgcgggggcctcccctaccgcaacatgtccaaccaggagcacttcacggacgcgctggccgacacgtcgctggcgtccccggcgcagcggttcgtgtccacggacggcgtggtgaacgcgcgggcgcgggtgctgggcggcgggagctgcctcaacgccgggttctacacgcgggccagcaacgagtacgtgcgcacggccgggtgggacgccggcctcgtcaactcgtcgtaccggtgggtggagcgcgcgctggtgttccgcccggacgtgccgccgtggcaggccgcgctccgggacgcgctgctggaggccggcgtcacccccgacaacggcttcaccttcgaccacgtcacggggaccaagatcggcggcaccatcttcgacaacaacgggcagcgccacacggccgccgacttcctccggcacgcccggccgcgggggctcaccgtggtgctctacgccacggtgtcgcgggtcctgttcaggagccaggagggggtgccgtacccggtggcgtacggggtggtgttcgcggacccgctgggggtgcagcaccgggtgtacctccgggacgggggcaagaacgaggtgatcctgtcggcggggacgctggggagcccgcagctgctgatgctgagcggcgtgggcccgcaggtgcacctggaggcgcacggcatccaggtgctggtggaccagcccatggtcgggcagggcgtggccgacaaccccatgaactcggtcttcatcccgtcgccggtgccggtggggctgtccctggtgcaggtcgtcgggatcaccaagtccggcagcttcatcgagggcgtgagcggctccgagttcggcatcccggtgtccgacggcgcccgccggctggccagcttcgggctcttctccccgcagaccgggcaactcggcacgctgccgccggggcagaggacgccggaggcgctgcagcgcgcggcggaggcgatgcggcggctggacaggcgggcgttccggggcggcttcatcctggagaagatcctggggccggtgtcgacggggcacatcgagctgcgcagcaccgacccgcgcgccaacccggccgtgaccttcaactacttccaggaggcggaggacctggagcggtgcgtccgggggatccagacgatcgagcgggtgatccagtcgcgcgccttctccaacttcacctacgccaacaccaccgtggagtccatcttcaccgactcggccaacttccccgtcaacctgctgccgcgccacgtcaacgactcccgctcgccggagcagtactgcagggagaccgtcatgaccatctggcactaccacggcgggtgccacgtcggcgccgtcgtcgacgacaactaccgggtgttcggggtcagggggctcagggtcatcgacagctccaccttcaggtactcccccggcaccaacccgcaggccaccgtcatgatgctcggcaggtaaacgcaactctcaaatcacccccgcaattatactgatctgaatgaactcaactaacacaactgttgtaaatctgtacaggtatatgggcataaagattcaggccgagagatggaggaaatgatatttcaaggagccatatttgaatgtaattcatggcataatattgtatttggggaacctggtttagacagattaatttgtttttttccacttattctctaggcatagtcttttagtgcctgtttgttgattattatgaaacccagtcatccctttaacatgcatttctctgcattgcaaaataagaaggaaaaacttatgttgcaaaggcatgacggtggttcaagcaacaatacttcgatcaaaaaaattggaaaccggttgccacatccacctaccaatttccattgataacaagagtagcaaaccagaatactgtgcaggatgcatttacagttttgtactagaaacttaatttcatgaaattacataccactattttacttggtggttgttacatgctacaaacgccaggttcccttcagagggatccagcaagccatcatcttatctatacagggaccgagtacatgtcaaaggaacatgatgagttaagaatggaacagccaaaggcagaaatgacttgaacattttttttccttgtttccaacttgccctacttgcctgctacctatatattggcttgcgaaattctctccctacctatgttatcaggaaccagaaaatgctacttcggcatctctgttgtccagaatacccaagaagtcaccaacaattgcatgcttgcataagaataattcatatagtgaggttttcttggatggccgtgaaggagccacaaatgtttccgcccatgtctgggaatgtcgcacatcctggcaagggtttcaccttgcctttacggtcaacacttacagggtacttgaggaggtggcctctcatctcagtcacctcatttgcaaagaactgatcccagttatgttgcccgagttgacgaacccgcctcatgcactctaggctctctggatggttaaactcttcctcgataattccaatatgctcagcccagagggacattctgtagccataaatctacataaaaaatcaccaaacttgatttaagagtataatccagaaataccagctgcgtcataactagattattaccctaagagatgagatgatataccccgacaacctttttcacttgctgttttagaatgcacatattagtatttatattcacataactgtacttgtagaattgccaccaacagtatttatgtgtcattacatgtctatagtttagtgtatatataattgaaaaaaaggtaaatgttaaatgggtgtagttggaggcagtctctctaaataaggtgaaacaattgtaatgaagcagcagttctaagcaacgcataacatcaggaagacaagtacaaaatctgcaggcacaatctcaaaatgcaagctcatgaaaacacctgtcttctgcaggtacc

SEQ ID NO: 123 - protein, 588 aa, Triticum aestivum
MPSSPAQMALGRARSPALVLAAAVLGALCIVALSEDEQLENLRFVQHAQDAPLVSHYNYIVVGGGTSGCPLAATLSEHSRVLLLERGGLPYRNMSNQEHFTDALADTSLASPAQRFISTDGVVNARARVLGGGSCLNAGFYTRASNEYVRTAGWDAGLVNSSYRWVERALVFRPDVPPWQAALRDALLEAGVTPDNGFTFDHVTGTKIGGTIFDNNGQRHTAADFLRHARPRGLTVVLYATVSRILFRSQEGVPYPVAYGVVFADPLGVQHRVYLRDGGKNEVILSAGTLGSPQLLMLSGVGPQAHLEAHGIQVLVDQPMVGQGVADNPMNSVFIPSPVPVGLSLVQVVGITKSGSFIEGVSGSEFGIPVSDGARRLASFGLFSPQTGQLGTLPPGQRTPEALQRAAEAMRRLDRRAFRGGFILEKILGPVSTGHIELRSTDPRANPAVTFNYFQEAEDLERCVRGIQTIERVIQSRAFSNFTYANTTVESIFTDSANFPVNLLPRHVNDSRSPEQYCRETVMTIWHYHGGCHVGAVVDDNYRVFGVRGLRVIDSSTFRYSPGTNPQATVMMLGRYMGIKIQAERWRK

SEQ ID NO: 124 - DNA, 1767 bp, Triticum aestivum
  source 1..1767: mol_type = unassigned DNA
atgccgagctcgccggcgcaaatggcacttggccgcgcgagatcaccggcgctggtgctcgccgccgccgttcttggcgcgctctgcatcgtcgcactctcggaggatgagcaactggagaacctgcggttcgtgcagcacgcgcaggacgcgccgctggtgtcgcactacaactacatcgtggtcggcggcggcacgtccgggtgcccgctggcggcgacgctgtcggagcactcgcgggtgctcctgctggagcgcgggggcctcccctaccgcaacatgtcgaaccaggagcacttcacggacgcgctggccgacacgtcgctggcgtccccggcccagcggttcatctccacggacggcgtggtgaacgcgcgggcgcgggtgctgggcggcgggagctgcctcaacgccggattctacacgcgggccagcaacgagtacgtgcgcacggccgggtgggacgccggcctcgtgaactcgtcgtatcggtgggtggagcgcgcgctggtgttccgccccgacgtgccgccgtggcaggccgcgctccgggacgcgctgctcgaggccggcgtcacccccgacaacggcttcaccttcgatcacgtcacggggaccaagatcggcggcaccatcttcgacaacaacgggcagcgccacacggccgccgacttcctccggcacgcccggccccgggggctcaccgtcgtgctctacgccacggtgtcccggatcctgttcagaagccaggagggggtgccgtatccggtggcgtacggggtggtgttcgcggacccgctgggggtgcagcaccgggtgtacctccgggacggggggaagaacgaggtgatactgtcggcggggacgctggggagcccgcagctgctgatgctgagcggcgtcggcccgcaggcgcacctcgaggcacacggcatccaggtgctggtggaccagcccatggtcgggcagggcgtggccgacaaccccatgaactcggtcttcatcccgtcgccggtgccggtggggctctccctggtgcaggtcgtcgggatcaccaagtccggcagcttcatcgagggcgtgagcggctccgagttcggcatcccggtctccgacggcgcccgccgcctggccagcttcggcctcttctccccccagaccgggcagctcggcacgctgccgccggggcagaggacgccggaggcgctgcagcgcgcggcggaggcgatgaggcggctggacaggcgggcgttccggggcgggttcatcctggagaagatcctggggccggtgtccacgggccacatcgagctgcgcagcaccgacccgcgcgcgaacccggcggtgacgttcaactacttccaggaggcggaggacctggagcggtgcgtccgggggatccagacgatcgagcgggtgatccagtcgcgcgccttctccaacttcacctacgccaacaccaccgtcgagtccatcttcaccgactcggccaacttccccgtcaacctgctgccgcggcacgtcaacgactcccgctcgccggagcagtactgcagggagaccgtcatgaccatctggcactaccacggcggatgccacgtcggcgccgtcgtcgacgacaactaccgggtgttcggggtgagggggctcagggtgatcgacagctccaccttcaggtactcccccggcaccaacccgcaggccaccgtcatgatgctcggcaggtatatgggcataaagattcaggccgagagatggaggaaatga

SEQ ID NO: 125 - DNA, 4649 bp, Triticum aestivum
  source 1..4649: mol_type = unassigned DNA
ggtacgtgatctccggcatggcaacatagtagagattgctcaccggtttttgcaaatgtggagaaagattcagggtgcaggcattgttctctcctccaacgaggaccggatcagctgggtggcaaccagaggaggaggaagctactcggctaaggctgcttacgatctacaaatcagtgacattcctccttcaggaggcaaagctgcgatttggagggcttgggcgccaggcacggtgaagatcttcgcctggctgctccaccaggacaagctttggtgcaacgatcgcctgcaacggcgagggtggcccaatgggtatttttgcgtatgctgcaacagaaatctggaaagctcaatacaccttttctgggactgcccttttgcccgatctgtctggccggcagtgtcgcgtagatatggttgcgctgtgctcaaagaagcgcgggacgcaggtcacagttccctcagacattgggaaagactgaccgcactaacgcctcaaagttgcagaaaagggctaaggtcgatgctgttgctgatcacttgggagttttggaaagagaggaacgcgtgtgtatttagaggaaaaacgccccagacggaggatgttcagcgagccatcaagaacacgatggagctctggcgggcagcaggagctcgatgcattgaggccctgttctgtagcgagataaaacgtacggctcatgtagctggcctagttttggccattcttagctcttctcaaaccatgatcacttgatcgcccatgtatttcccactgctttcttctaaatcaatgaagcaggtgaacccggatctttcaaaaaaaaacctcctgatgtactcagtgtcgtggccggtgatttaaccgtgtccactgattaattggaatgtatggtgttccaggtcaaaaaagaatgtcaaatgtaattctttcggaaaaaatatagtgcacgcgcaaaaccgtctcaagattggccagtaaaccctctcgcttgctgctccgtcgcatttgatatactcaacagctcctcctgtctaaaaagaaagttcatcacttctgcatttcacgaccaatgcattgcatttgatataaccattccctttctatagtaacacatgtttatgggctcctcgcggctcttctttgcactgcaaccgcctccgcattatttaacacatctaccctcgatctacccgcgcgctaactccaggtttataagcgaagcgaacttttcgcgtccctgaagcgtaaaggatgccgagctcgccggcgcaaatggcacttggccgcgcgagatcaccggcgctggtgctcgccgccgccgttcttggcgcgctctgcatcgtcgcactctcggaggatggtgcgtgtgttcacctgcatggtttttctgggggttttgcgtcagctacgtgcgtgtgtcttttatcatgatcaatggacgctgtgatgatcaatggtgccgtgcgtgtgcagagcaactggagaacctgcggttcgtgcagcacgcgcaggacgcgccgctggtgtcgcactacaactacatcgtggtcggcggcggcacgtccgggtgcccgctggcggcgacgctgtcggagcactcgcgggtgctcctgctggagcgcgggggcctcccctaccgcaacatgtcgaaccaggagcacttcacggacgcgctggccgacacgtcgctggcgtccccggcccagcggttcatctccacggacggcgtggtgaacgcgcgggcgcgggtgctgggcggcgggagctgcctcaacgccggattctacacgcgggccagcaacgagtacgtgcgcacggccgggtgggacgccggcctcgtgaactcgtcgtatcggtgggtggagcgcgcgctggtgttccgccccgacgtgccgccgtggcaggccgcgctccgggacgcgctgctcgaggccggcgtcacccccgacaacggcttcaccttcgatcacgtcacggggaccaagatcggcggcaccatcttcgacaacaacgggcagcgccacacggccgccgacttcctccggcacgcccggccccgggggctcaccgtcgtgctctacgccacggtgtcccggatcctgttcagaagccaggagggggtgccgtatccggtggcgtacggggtggtgttcgcggacccgctgggggtgcagcaccgggtgtacctccgggacggggggaagaacgaggtgatactgtcggcggggacgctggggagcccgcagctgctgatgctgagcggcgtcggcccgcaggcgcacctcgaggcacacggcatccaggtgctggtggaccagcccatggtcgggcagggcgtggccgacaaccccatgaactcggtcttcatcccgtcgccggtgccggtggggctctccctggtgcaggtcgtcgggatcaccaagtccggcagcttcatcgagggcgtgagcggctccgagttcggcatcccggtctccgacggcgcccgccgcctggccagcttcggcctcttctccccccagaccgggcagctcggcacgctgccgccggggcagaggacgccggaggcgctgcagcgcgcggcggaggcgatgaggcggctggacaggcgggcgttccggggcgggttcatcctggagaagatcctggggccggtgtccacgggccacatcgagctgcgcagcaccgacccgcgcgcgaacccggcggtgacgttcaactacttccaggaggcggaggacctggagcggtgcgtccgggggatccagacgatcgagcgggtgatccagtcgcgcgccttctccaacttcacctacgccaacaccaccgtcgagtccatcttcaccgactcggccaacttccccgtcaacctgctgccgcggcacgtcaacgactcccgctcgccggagcagtactgcagggagaccgtcatgaccatctggcactaccacggcggatgccacgtcggcgccgtcgtcgacgacaactaccgggtgttcggggtgagggggctcagggtgatcgacagctccaccttcaggtactcccccggcaccaacccgcaggccaccgtcatgatgctcggcaggtaaacgcaagtctgaaatgaccctcgcaattatactgatctgaatgaatgaatcaactcaactcaactaacacaactatgataaatctgtacaggtatatgggcataaagattcaggccgagagatggaggaaatgatatttcacggagccaaatttgcatgtaattcatggcataatattgtatttgggggacctggtttagaacagattaatttggtttttccacttattctctaggcatagtcttttagtgcctgtttgttgattattatgaaacccatacatccctttaacatgcatttctctgcactgtaaaataagaaggaaaacttatgtcccaaaggcatgatggtggttcaagcaacaatacttcggtaaaaaaatggaaccggttgccacatccacccaccaatttccattgatgacaagaggagcaaaccaaggcccaacattgcttcagaatagtgtgaaggatgcatttacagttttgcactagaaactttgtttcatcaaattacatataacatactactatttctcttggtggttgtcacttgctacaaacgccaggttcccttcagagggatccagcatgtaatcatcttacatatacagggaccgaatacatgtaaaaggaacatgattagttaagatgggaacaaccaaaaggcagaaatgacttgatttttttttccttgtttccaacttgccctacttgcctgctacctacatattggcttgcgaaattctctccctacctatgttatcaggaaccagaaagtgctacttcggcatctctgttgtccataatacccaagaagtcaccaacaattgcatgcttgcataagcagaattcatattgtgaggttttcctggatggccgtgaaggagccacaaatgtttccgcccatgtctgggaatgtcgcacatcctggcaagggtttcaccttgcctttacggtcaacacttacagggtacttgaggaggtggcctctcatctcagtcacctcatttgcaaagaactgatcccagttatgttgcccgagttgacgaacccgcctcatgcactctaggctctctggatggttaaagtcttcctcgataattccaatatgctcagcccagagggacattctgtagccataaatctacataaaaaatcaccaaacttgatttagagtataatccagaaataccagctgcgtcataagtcataactagattattaccctaagagatgagataatatacccagacaacctttttcactgctgttttagaatgcacatattagtatttaattcacataagaactgtacttgtagaattgccaccaacagtatgtatgtgtcattacgtgtctatagtttagtgtatatataattaaaaaaaggtaaatgttaaatgggcgtagttggaggcagtctctctgaaaacgtaaaaaataagtaaggtgaaacaattgtaatgaagcagtggttctaagcaacgcataacatcaggaagacaagtacaaaatctgcaggcacaatctcaaaatgcaagctcatga

SEQ ID NO: 126 - protein, 588 aa, Triticum aestivum
MPSSPAQMALGRARSPTLVLAAAVLGALCVVALSEDEQLENLRFVQHAQDAPLVSHYNYIVVGGGTSGCPLAATLSEHSRVLLLERGGLPYRNMSNQEHFTDALADTSLASPAQRFVSTDGVVNARARVLGGGSCLNAGFYTRASNEYVRTAGWDAGLVNSSYRWVERALVFRPDVPPWQAALRDALLEAGVTPDNGFTFDHVTGTKIGGTIFDNSGQRHTAADFLRHARPRGLTVVLYATVSRILFRSQEGVPYPVAYGVVFADPLGVQHRVYLRDGGKNEVILSAGTLGSPQLLMLSGVGPQAHLEAHGIQVLVDQPMVGQGVADNPMNSVFIPSPVPVGLSLVQVVGITKSGSFIEGVSGSEFGIPVSDGARRLASFGLFSPQTGQLGTLPPGQRTPEALQRAAEAMRRLDRRAFRGGFILEKILGPVSTGHIELRSTDPRANPAVTFNYFQEAEDLERCVRGIQTIERVIQSRAFSNFTYANTTVESIFTDSANFPVNLLPRHVNDSRSPEQYCRETVMTIWHYHGGCHVGAVVDDNYRVFGVRGLRVIDSSTFRYSPGTNPQATVMMLGRYMGIKIQAERWRK

SEQ ID NO: 127 - DNA, 1767 bp, Triticum aestivum
  source 1..1767: mol_type = unassigned DNA
atgccgagctcgccggcgcaaatggcacttggccgcgcgagatcgccgacgctggtgctcgccgccgcggtccttggcgcgctctgcgtcgtcgcactctcggaggacgagcaactggagaacctgcggttcgtgcagcacgcgcaggacgcgccgctggtgtcgcactacaactacatcgtggtcggcggcggcacgtccgggtgcccgctggcggcgacgctgtcggagcactcgcgggtgctgctgctggagcgcgggggcctcccctaccgcaacatgtccaaccaggagcacttcacggatgcgctggccgacacgtcgctggcgtccccggcccagcggttcgtctccacggacggcgtggtgaacgcgcgggcgcgggtgctgggcggcgggagctgcctcaacgccgggttctacacgcgggccagcaacgagtacgtgcgcacggccgggtgggacgccggcctcgtcaactcgtcgtaccggtgggtggagcgcgcgctggtgttccgccccgacgtgccgccgtggcaggccgcgctccgggacgcgctgctcgaggccggcgtcacccccgacaacggcttcaccttcgaccacgtcacggggaccaagatcggcggcaccatcttcgacaacagcgggcagcgccacaccgcggccgacttcctccggcacgcccggccccgggggctcaccgtcgtgctctacgccacggtgtcgcggatcctgttcagaagccaggagggggtgccgtacccggtggcgtacggggtggtgttcgcggacccgctgggggtgcagcaccgggtgtacctccgggacggcgggaagaacgaggtgatactgtcggcggggacgctggggagcccgcagctgctgatgctgagcggcgtgggcccgcaggcgcacctggaggcgcacggcatccaggtgctggtggaccagcccatggtcgggcagggcgtggccgacaaccccatgaactcggtcttcatcccgtcgccggtgccggtggggctctccctggtgcaggtcgtcgggatcaccaagtccggcagcttcatcgagggcgtgagcggctccgagttcggcatcccggtctccgacggcgcccgccgcctggccagcttcggcctcttctccccccagaccgggcagctcggcacgctgccgccggggcagaggacgccggaggcgctgcagcgcgcggcggaggcgatgaggcggctggacaggcgggcgttccggggcggcttcatcctggagaagatcctggggccggtgtcgacggggcacatcgagctgcgcagcaccgacccgcgcgccaacccggccgtgaccttcaactacttccaggaggcggaggacctggagcggtgcgtccgggggatccagacgatcgagcgggtgatccagtcgcgcgccttctccaacttcacctacgccaacaccaccgtcgagtccatcttcaccgactcggccaacttccccgtcaacctgctgccgcggcacgtcaacgactcccgctcgccggagcagtactgcagggagaccgtcatgaccatctggcactaccacggcgggtgccacgtcggcgccgtcgtcgacgacaactaccgggtgttcggggtgagggggctcagggtcatcgacagctccaccttcaggtactcccccggcaccaacccacaggccaccgtcatgatgctcggcaggtatatgggcataaagattcaggccgagagatggaggaaatga

SEQ ID NO: 128 - DNA, 4820 bp, Triticum aestivum
  source 1..4820: mol_type = unassigned DNA
tgcattgtgaaggcagatctcactatcgttggtttatacaatgatggctagatctttacctcatgcctatggagagataaagccctttcatcctcctagcaagacttatatatgagatgatgttgtggtagcagcactaaaaactttttttttagaaaaggagcagcactaaaaacttggggtgattagtagtaatgagctggatttgagaagtgagatgacttcacgcatatatttctaggtattatatatcaagcagaaatatgatattggaagtacttgtgtttgcatggatgatgcaactatgtcggtcagcttgtctcgctacatggatgtttgattcagctaaaccatgttatctctcgcttggtttttgtgcaccatggatgttccagttgatgaatggttccatgtaaagcgctttgcttctatttattttgggaaggaaaacggctctttccattgtccaccgtccatttattttgatcccatgggccagattttagaactcccggtcccggaactaaactaatatttattacttctataaagaatgttggagtatcaggtcttcggggagcctttgcgtgtgaaaatgtcctccgcgttgttcgttgcatgttggccacccgcggttggctccctggggcgctctgggccgtccgatctaggcaggcgcctcacacccggacgacttgcctatgggtccatgccgggggggctgcgggcacggttgggtccatcgtgatgtggtgttttcgatcacaccagtttgtgccctcttgttggttgccttgcgcgtgacgggccgaccctgttggtgtagttcgcttgtgccaggcaagccgcgcacacccccggatcggggtggcgcgtgttaggaaaccggagagggccatccggccagccgtcgcgatggcgggccagccggccaaggttcatttatttgaggcaaatttctttagtgacatccgtgctatggggcgtttgctggggattggtttctagcgaacgttcgccagattatctttaccgctttcttttagtatctaggtttttcttagtattttattatttttctcatagtttggaccgatctcctcacgtcagaatgtcaaatgtaatcctttcgaaaaaaatatagtgcacgcgcgaaaaccgtctcaagattggccagtaaaccctcctgcttactgctccatcgcatttgatatactccttctgtgtaaaaagaatgttcatcacttttgcatttcacaaccaatgcattgcatttgatataaccattccctttctatagtaacacaagtttatgggctcctcgcagctgttctttgcactgcaaccgcctccgcattatttaacagatctaccctcgatctacccgcgcgctaactcgaggtttataaaccaagcgaacttttcgcgtccctgaagcgcaaaggatgccgagctcgccggcgcaaatggcacttggccgcgcgagatcgccgacgctggtgctcgccgccgcggtccttggcgcgctctgcgtcgtcgcactctcggaggacggtgcgtgtgttcacctgcatggtttttctgggggttttgcacgtcagctacgtgcgttgtctcttttatcatgatcactggacgctgtgatgaccaatggtgccatacgtgtgcagagcaactggagaacctgcggttcgtgcagcacgcgcaggacgcgccgctggtgtcgcactacaactacatcgtggtcggcggcggcacgtccgggtgcccgctggcggcgacgctgtcggagcactcgcgggtgctgctgctggagcgcgggggcctcccctaccgcaacatgtccaaccaggagcacttcacggatgcgctggccgacacgtcgctggcgtccccggcccagcggttcgtctccacggacggcgtggtgaacgcgcgggcgcgggtgctgggcggcgggagctgcctcaacgccgggttctacacgcgggccagcaacgagtacgtgcgcacggccgggtgggacgccggcctcgtcaactcgtcgtaccggtgggtggagcgcgcgctggtgttccgccccgacgtgccgccgtggcaggccgcgctccgggacgcgctgctcgaggccggcgtcacccccgacaacggcttcaccttcgaccacgtcacggggaccaagatcggcggcaccatcttcgacaacagcgggcagcgccacaccgcggccgacttcctccggcacgcccggccccgggggctcaccgtcgtgctctacgccacggtgtcgcggatcctgttcagaagccaggagggggtgccgtacccggtggcgtacggggtggtgttcgcggacccgctgggggtgcagcaccgggtgtacctccgggacggcgggaagaacgaggtgatactgtcggcggggacgctggggagcccgcagctgctgatgctgagcggcgtgggcccgcaggcgcacctggaggcgcacggcatccaggtgctggtggaccagcccatggtcgggcagggcgtggccgacaaccccatgaactcggtcttcatcccgtcgccggtgccggtggggctctccctggtgcaggtcgtcgggatcaccaagtccggcagcttcatcgagggcgtgagcggctccgagttcggcatcccggtctccgacggcgcccgccgcctggccagcttcggcctcttctccccccagaccgggcagctcggcacgctgccgccggggcagaggacgccggaggcgctgcagcgcgcggcggaggcgatgaggcggctggacaggcgggcgttccggggcggcttcatcctggagaagatcctggggccggtgtcgacggggcacatcgagctgcgcagcaccgacccgcgcgccaacccggccgtgaccttcaactacttccaggaggcggaggacctggagcggtgcgtccgggggatccagacgatcgagcgggtgatccagtcgcgcgccttctccaacttcacctacgccaacaccaccgtcgagtccatcttcaccgactcggccaacttccccgtcaacctgctgccgcggcacgtcaacgactcccgctcgccggagcagtactgcagggagaccgtcatgaccatctggcactaccacggcgggtgccacgtcggcgccgtcgtcgacgacaactaccgggtgttcggggtgagggggctcagggtcatcgacagctccaccttcaggtactcccccggcaccaacccacaggccaccgtcatgatgctcggcaggtaaacgcaagtctgagatgacccccgcaattatactgatctgaatgaatgaatcaactctactaacacaactatgataactctgtacaggtatatgggcataaagattcaggccgagagatggaggaaatgatatttcacggagccaaatttgcatgtaattcgtggcataatattgtatttgggggacctggtttagaacagattaatttggtttttccacttattctctaggcatagtcttttagtgcctgtttgttgattactatgaaacccagacatccctttaacatgcatttctctgcattgcaaaataagaaagaaaacttatgttgcaaaggcatgatggtggttcaagcaacaatacttcggtaaaaaaatggaaaccggttgcaacatccacccaccaatttccattgatgacaagagtagcaaaccaaggcccaacattgcttcaaaaaactgtgcaggatgcatttacagttttgcactagaaacttagtttcatcaaattacatataacatactactatttctcttggtggttgtcacttgctacaaacgccaggttcccttcagagggatccagcatgtaatcatcttacctatacagggaccgaatacatgtaaaaggaacatgattagttaagacgggaacaaccaaaaggcagaaatgacttgaattttttttccttgtttccaacttgccctacttgcctgctacctacatattggcttgcgaaattctctccctacctatgttatcaggaaccagaaagtgctacttcggcatctctgttgtccagaatacccaagaagccaacaattgcattcttgcataagcagaattcatattgtgaggttttcctggatggccgtgaaggagccacaaatgtttccgcccatgtctgggaatgtcgcacatcctggcaagggtttcaccttgcctttacggtcaacacttacagggtacttgaggaggtggcctctcatctcagtcacctcattggcaaagaactgatcccagttatgttgcccgagttgacgaacccgcctcatgcactctaggctctctggatggttaaagtcttcctcgataattccaatatgctcagcccagagggacattctgtagccataaatctacataaaagatcaccaaacttgatttagagtataatccagaaataccagctgcgtcataactagattattaccctataagagatgagatgatataccccgacaacctttttcacttgctgttttagaatgcacatattagtatttatattcacataagaactgtacttgtataattgccaccaacagtatttatgtgccattacgtgtctatagtttagtgtatatataataaaaaagggtaaatgttaaataggtgtagttggaggcagtctctctgaaaacgtaaaaaataagttaaaacaattgtaatgaagcagcggttctaagcaacgcataacatcaggaagacaagtacaaaatctgcaggcacaatctcaaaatgcaagctc

SEQ ID NO: 129 - DNA, 1356 bp, Triticum aestivum
  source 1..1356: mol_type = unassigned DNA
atgacaggatctttgacccatgattcttctctggctcctaaatgcaacgacaacacaaatattgagctacagagattcaaggtgcagtcgttttctgcagatatcctttctgattcgaccaatctttcttctgaagctgcaagagcaatcaaccaccttcagcatcaactaggaattggtttggagcaggatatgcgaccagtggaaactgcgacctgggatacttctatctgcaccattcaagaccaaataatcaaccatcagcttagcgaagatccacaaaacatattggtgcaacaacagattcaacagtatgatgctgcgctttatccaaacagtggttacacaccagcacctgatctcttaaaccttctccactgcactgtggctccagtgttccctccaacagcatcagtttttggtgatacagcactaagtggtggtaccaactatttggatcttaatgatgagtttacaggagtggcagcaattcctgacagtggattaatgtacactagtgatccggcattgcagttagggtaccatgctgcccagtctcacgcactaaaggatatctgccattcactgccgcaaaattatgggctgttccccagtgaggatgaaagagatgccatccttggggttggaagtgtcggaggagatctttttcaggatatggatgacaggcaatttgatactgtactggagggcagaagagggaagggtgacttcggaaagggaaaaggaaaagctaactttgcgacagagagagagaggagggaacagctaaatgtgaagtataagactttaagaatgctcttccccaatcctaccaagaatgacagggcttcagtagtaggtgatgccattgaatacatagatgagctgaatcgaacagtgaaggaactgaagatcctagtggaacagaagtggcatgggactaataggagaaagataagaaagttggatgaagaggccgctgctgatggtgaaagctcatcgatgaggccaataagggatgagcaagacaatcagcttgatggggccataagaagctcatgggttcagaggaggtccagggagtgccatgttgatgttcgcatagtggaaaatgaaataaacatcaagctcacagaaaagaagacgaccaactcctccctgcttcatgttgcaaaggttcttgatgaattccatcttgagatcatccatgtggttggagggattattggtgatcactacatattcatgtttaacactaaggtgtctgaaggttcctcaatttatgcttgtgcagtggcaaagaggatccttcaagcagtggatgcacaacaccaggcacttgacatattcaactag

SEQ ID NO: 130 - DNA, 1449 bp, Triticum aestivum
  misc_difference 106..111: note = a, c, t, g, unknown or other
  source 1..1449: mol_type = unassigned DNA
atgggacttctctacacggaagaacagacagccacattgcatagcttaaaactccacggctctacctcttttgcaacaaccaaaacagccaggccaactgcaattnnnnnncatgattcttctctggctcctaaatgcaacgacaacacaaatattgagctacagagattcaaggtgcagtcgttttctgcagatatcctttctgattcgaccaatctttcttctgaagctgcaagagcgatcaaccacctccagcatcaactaggaattggtttggagcaggatatgccgccagtgggaactgcgacctgggatacttctatctgcaccattcaagaccaaattatcaaccatcagcttagcgaagatccacaaaacatattggtgcaacaacagattcaacagtatgatgctgcgctttatccaaacagtggttacacaccagcacctgatctcttaaaccttctccactgcactgtggctccagtgttccctgcaacagcatcagtctttggtgatacagcactaagtggtgataccaactatttggatcttaatggtgagtttacaggagtggcagcaattcctgacagtggattaatgtacactagtgatccagcattgcagttagggtaccatgctgcccagtctcacgcactaaaggatatctgccattcactgccgcaaaattatgggctcttccccagtgaggatgaaagagatgtcatgcttggggttggaagtgtcggaggagatctttttcaggatatagatgacaggcaatttgatactgtactggagggcagaagaggaaagggtgagttcggaaaaggaaaaggaaaagctaactttgcgactgagagagagaggagggaacaactcaatgtgaagtataagacgttaagaatgctcttccccaaccctaccaagaatgacagggcttcagtagtaggtgatgccattgaatacatagatgagctgaatcgaacagtgaaggaactgaagatcctagtggaacagaagtggcatgggactaataggagaaagataagaaagttggatgaagaggcggctgctgatggtgaaagctcatcgatgaggccaatgagggatgagcaagacaatcagcttgatggggccataagaagctcatgggttcagaggaggtccagggagtgccatgttgatgttcgcatagtggaaaatgaaataaacatcaagctcacagaaaagaagaagaccaactcctccctgcttcatgttgcaaaggttcttgatgaattccatcttgagatcatccatgtagttggagggattattggtgatcactacatattcatgtttaacactaaggtgactgaaggttcctcagtttatgcttgtgcagtggcaaagaggatccttcaagcagtggatgcacaacaccaggcacttgacatattcaactag

SEQ ID NO: 131 - DNA, 22 bp, synthetic construct
  misc_feature 1..22: note = Description of Artificial Sequence: Syntheticoligonucleotide
  source 1..22: mol_type = other DNA
cccacggctgggactactgcat

SEQ ID NO: 132 - DNA, 22 bp, synthetic construct
  misc_feature 1..22: note = Description of Artificial Sequence: Syntheticoligonucleotide
  source 1..22: mol_type = other DNA
cctccagcggcggcgagaagac

SEQ ID NO: 133 - DNA, 22 bp, synthetic construct
  misc_feature 1..22: note = Description of Artificial Sequence: Syntheticoligonucleotide
  source 1..22: mol_type = other DNA
ggctcctcgtccccgtcgccgg

SEQ ID NO: 134 - DNA, 22 bp, synthetic construct
  misc_feature 1..22: note = Description of Artificial Sequence: Syntheticoligonucleotide
  source 1..22: mol_type = other DNA
cctcggggacgcgatcgactac

SEQ ID NO: 135 - DNA, 22 bp, synthetic construct
  misc_feature 1..22: note = Description of Artificial Sequence: Syntheticoligonucleotide
  source 1..22: mol_type = other DNA
cccacggctgggactactgcat

SEQ ID NO: 136 - DNA, 22 bp, synthetic construct
  misc_feature 1..22: note = Description of Artificial Sequence: Syntheticoligonucleotide
  source 1..22: mol_type = other DNA
cctccagcggcggcgagaagac

SEQ ID NO: 137 - DNA, 22 bp, synthetic construct
  misc_feature 1..22: note = Description of Artificial Sequence: Syntheticoligonucleotide
  source 1..22: mol_type = other DNA
ggctcctcgtccccgtcgccgg

SEQ ID NO: 138 - DNA, 22 bp, synthetic construct
  misc_feature 1..22: note = Description of Artificial Sequence: Syntheticoligonucleotide
  source 1..22: mol_type = other DNA
cctcggggacgcgatcgactac

SEQ ID NO: 139 - DNA, 22 bp, synthetic construct
  misc_feature 1..22: note = Description of Artificial Sequence: Syntheticoligonucleotide
  source 1..22: mol_type = other DNA
cccacggctgggactactgcat

SEQ ID NO: 140 - DNA, 22 bp, synthetic construct
  misc_feature 1..22: note = Description of Artificial Sequence: Syntheticoligonucleotide
  source 1..22: mol_type = other DNA
cctccagcggcggcgagaagac

SEQ ID NO: 141 - DNA, 22 bp, synthetic construct
  misc_feature 1..22: note = Description of Artificial Sequence: Syntheticoligonucleotide
  source 1..22: mol_type = other DNA
ggctcctcgtccccgtcgccgg

SEQ ID NO: 142 - DNA, 22 bp, synthetic construct
  misc_feature 1..22: note = Description of Artificial Sequence: Syntheticoligonucleotide
  source 1..22: mol_type = other DNA
cctcggggacgcgatcgactac

SEQ ID NO: 143 - DNA, 22 bp, synthetic construct
  misc_feature 1..22: note = Description of Artificial Sequence: Syntheticoligonucleotide
  source 1..22: mol_type = other DNA
attgagctacagagattcaagg

SEQ ID NO: 144 - DNA, 22 bp, synthetic construct
  misc_feature 1..22: note = Description of Artificial Sequence: Syntheticoligonucleotide
  source 1..22: mol_type = other DNA
cctgggatacttctatctgcac

SEQ ID NO: 145 - DNA, 22 bp, synthetic construct
  misc_feature 1..22: note = Description of Artificial Sequence: Syntheticoligonucleotide
  source 1..22: mol_type = other DNA
ccagcacctgatctcttaaacc

SEQ ID NO: 146 - DNA, 22 bp, synthetic construct
  misc_feature 1..22: note = Description of Artificial Sequence: Syntheticoligonucleotide
  source 1..22: mol_type = other DNA
ccccagtgaggatgaaagagat

SEQ ID NO: 147 - DNA, 22 bp, synthetic construct
  misc_feature 1..22: note = Description of Artificial Sequence: Syntheticoligonucleotide
  source 1..22: mol_type = other DNA
attgagctacagagattcaagg

SEQ ID NO: 148 - DNA, 22 bp, synthetic construct
  misc_feature 1..22: note = Description of Artificial Sequence: Syntheticoligonucleotide
  source 1..22: mol_type = other DNA
cctgggatacttctatctgcac

SEQ ID NO: 149 - DNA, 22 bp, synthetic construct
  misc_feature 1..22: note = Description of Artificial Sequence: Syntheticoligonucleotide
  source 1..22: mol_type = other DNA
ccagcacctgatctcttaaacc

SEQ ID NO: 150 - DNA, 22 bp, synthetic construct
  misc_feature 1..22: note = Description of Artificial Sequence: Syntheticoligonucleotide
  source 1..22: mol_type = other DNA
ccccagtgaggatgaaagagat

SEQ ID NO: 151 - DNA, 22 bp, synthetic construct
  misc_feature 1..22: note = Description of Artificial Sequence: Syntheticoligonucleotide
  source 1..22: mol_type = other DNA
cctgggatacttctatctgcac

SEQ ID NO: 152 - DNA, 22 bp, synthetic construct
  misc_feature 1..22: note = Description of Artificial Sequence: Syntheticoligonucleotide
  source 1..22: mol_type = other DNA
ccagcacctgatctcttaaacc

SEQ ID NO: 153 - DNA, 22 bp, synthetic construct
  misc_feature 1..22: note = Description of Artificial Sequence: Syntheticoligonucleotide
  source 1..22: mol_type = other DNA
ccagcacctgatctcttaaacc

SEQ ID NO: 154 - DNA, 22 bp, synthetic construct
  misc_feature 1..22: note = Description of Artificial Sequence: Syntheticoligonucleotide
  source 1..22: mol_type = other DNA
ccccagtgaggatgaaagagat

SEQ ID NO: 155 - DNA, 1707 bp, unidentified
  misc_feature 1..1707: note = Description of Unknown: Blue aleurone gene sequence
  source 1..1707: mol_type = unassigned DNA
atgcgggaaatagctactcagcggtgtggtaatcgatcaatggcgctatcagctcctcccagtcaggaacagccgtcggggaagcaattcggctaccagctcgctgctgctgtgaggagcatcaactggacttatggcatattttggtccatttccgccagcccgcgcccaggccactcctcagttctggcgtggaaggatgggttctacaacggcgagataaagactagaaagattaccggctcgaccactacggagcttacagcggacgagcgcgtcatgcacagaagcaagcaactgagggagctctacgaatcgctcttgcccggcaactccaacaaccgggcaaggcgaccaaccgcctcactgtcaccggaggatctcggggacggcgagtggtattacaccataagcatgacttacaccttccaccctaatcaagggttgccaggcaaaagctttgcgagcaatcaacatgtttggctgtacaacgctcaatacgcaaacaccagagttttcccccgcgcgctcttagcaaagacaatcgtttgcattcccttcatgggcggtgtgcttgagctcggaacgtcggatcaggtgttggaggacccgagcatggtgaagcggatcagcacgtctttctgggagctgcacttgccgtcatccttggagtcgaaggatccgagctccagcacatcagcaaacgataccagggaggccaccgacatcatcttgttcgaggatttcgaccacaacgacacagttgagggggtgatctctgagcaaagggaggtccagtgcccgtccaacgtcaatctggagcgcctcacaaagcagatggacgagttccacagccttctcggtggactggacgtgcatcctctcgaagacagatggatcatggacgagccctttgagtttacgttttccccagaagtggcgccggctatggatatgccgagcaccgacgatgtcatcgtcactttaagtaggtccgaaggctctcgtccatcctgcttcacagcgtggaagggatcatccgagtcgaaatacgtggctggccaggtcgttggggagtcacagaagttgctgaataaagttgtggctggtggtgcatgggcgagcaattatggcggtcgcaccatggtgagagctcagggaattaacagcaacacccatgtcatgacagagagaagacgccgggagaaactcaacgagatgttcctggttctcaagtcactggtcccgtccattcacaaggtagacaaagcatccatcctcacagaaacgataggttatcttagagaactgaagcaaagggtagatcagctagaatccagccggtcaccgtctcacccaaaagaaacaacaggaccgagcagaagccatgtcgtcggcgctaggaagaagatagtctcggccggatccaagaggaaggcgccagggctggagagcccgagcaatgtcgtgaacgtgacgatgctggacaaggtggtgctgttggaggtgcagtgcccgtggaaggagctgctgatgacacaagtgtttgacgccatcaagagcctctgtctggacgttgtctccgtgcaggcatccacatcaggtggccgtcttgacctcaagatacgagctaatcagcagcttgcggtcggttctgctatggtggcacctggggcaatcaccgaaacacttcagaaagctatatag

SEQ ID NO: 156 - DNA, 23 bp, synthetic construct
  misc_feature 1..23: note = Description of Artificial Sequence: Syntheticoligonucleotide
  source 1..23: mol_type = other DNA
gggggatgggggcttacgtaggg

SEQ ID NO: 157 - DNA, 4632 bp, Triticum aestivum
  source 1..4632: mol_type = unassigned DNA
agtgactttccattgaaaagggtcctcgcttagtaggtcctttgcaagatttatagtgagatgccattttgaatttggaacaaaggaaaataggcaggtgcgagtaagttgaatgcataagataatggattaggtaggaggacaacatgtatcgcggcattgaattgcaatttgtttgccctcttctgatatgacatggaactgaaataattggttgggcagagaaactaaaatcaagaccatgattttgaattggagtggcatacttgcatttataatttgggtgtttacaagagtgttattcttatattagggtagcagtgtatttgagtatttgggaaaagtctcacacctagtaaaaataatatttgttaatttattttttgtctttaaacaatagtttattcaaggataggaaagctgatggagttgcttcaagtgacttcccattgaaaagggtcctctcttgtgttgcatgggatggtctaaattaaaagagggatggatcctctcctctcctaagcatgcggtgagccagagaggatgcatggccaaataaagtgaaaccaccaaacacatggcatgcaggcgttggcgccaaaacgaacgctcctgcctgcctgcctgcctgcctgcctgcctgctgcatgcatgtccctccctccgtcctcaacgcccgtccttggtgaagctccggccttcccctagctttctctttctctttctctttctctttctcttttcccttccctggaaggaactccaggccggagcgggagcaggagcaggaggagagggaggccctcctctgttcttctccctcctcaacatccatccattcaatttataacttgccacctccaaaaacctccatcgccgtgattgccccatcatggcggccgcccgaggccgaggccgaggccgaggccgatgcgtccttctcgctgccgtcctcctcttgacggcggtggtcggcgcagacatatacaagccaacggactccattctggttcactgcgggtcggacaaggacgggcaggacgaggacggcaggaagtggaccaccgacaaggacagcaagtggctccccgacggcggcaagtcctccatcatgggcaccgccgacgtggcggacccgtcgctcccctcccccgtgccctacatgacggcgcgggtcttccccaaggagaccgcctacaccttccccgtggccgacgccgaccgccactgggtgcgcctccacttctacccggcggcctaccacggcatccccgccgaccacttcttcttctccgtcaccacctccaccggcgtcacgctgctgcgcaacttcagcgtctacatcaccgccaaggccctcacccaggcctacatcatccgggagttctccctccctccctccaccgtcggctcgctctccctcaaattcacgcccaccgccatgaacaacgcctcctacgccttcgtcaacggcatcgaggtcatctccatgcccagcttcttcggcgacccggccacactggtcggcctcaacgaccagtccctcgacgccagcgccgccaacctgcagaccatgtaccggctcagcgtcggcggctcctacatcccgcccgccaacgactccggcctgtcccgcgagtggttctccgacacgccctacgtctacggcgccgccacgggcgtcaccttcgaggccaacgacacggtcccgatcaagtacccggcccccgccgacgagtacgccgcgcccgtcagcatctacgactcgttccgccacatggggcgcgaccccaagatgaacaagaacaacaacctcacctgggtgttcgaggtggacggcaacttcacctacctcctccgcctccacttctgctcgctcatggaagacaagatcaaccaggtcgtcttcgccatcctcctcaacaacaagaccgccaccaccaccggcagcgccgacatcatcgcctgggccaaggagaagaaccctgctaatcccggcgcgcccggcaagggcgtgccggtcttcaaggactacgcggtgttcatgcccgccgccccggcgggcaacgacaccatcctctggctcacgctgcgcccggacaccgccaccagaacacagttcgtcaacgctttcctcaacggcctggaggtgtttaaggtgagcgacgcctccggcaacctggccggcccaaacccggacatctccaagatgctggcggaggccgagctgggggccgtggaggggcagttcagggagaagccgagcaacgtcggggcgctcatcggcggggcggcgggcggcgcggcggcgttcgggctggtggcggccgtgtgcttcgtggcgtaccagagcaagaggaggagggagctgagcagcagcccgtcacactcctcctccgggtggctgccggtgtacggcgggtcgacgagcgtgagcaagtcgtcgggcggcaggagcgcggcgacgctcaaccccaacatcacggccatgtgccggcacttctcgctccaggagataaagtcggcgaccaaggggttcgacgagtcgctggtgatcggcgtgggcgggttcggcaaggtgtaccgcggggtggtggacggggacaccaaggtggccgtcaagcggagcaacccgtcgtcggagcagggggtactggagttccagacggagatcgagatgctgtccaagctgcggcacaagcacctggtgtccctcatcggctgctgcgaggacaacggcgagatgatcctggtgtacgactacatggcgcacggcacgctgcgggagcacctgtacaacaagagcggcaagccgccgctgccgtggaggcagcggctggagatcgtcatcggcgccgcccgggggctgcactacctccacacgggcgccaagtacaccatcatccaccgggacgtcaagaccaccaacatcctggtggacgacaagtgggtggccaaggtgtccgacttcggcctctccaagacggggccgacggtgcagaaccagacgcacgtgagcaccatggtgaagggcagcttcgggtacctggacccggagtacttccggcggcagaagctgacggagaagtcggacgtctactcgttcggcgtggtgctgttcgaggtgctgtgcgggcggccggcgctgaacccgagcctgccgcgggagcaggtgagcctggcggaccacgcgctgagctgccagcggaagggcaccctggaggagatcgtggacccggtgctggaggggaagatcgcgcccgactgcctcaagaagttcgccgagacggcggagaagtgcctggcggaccagggcgtggaccggccgtccatgggcgacgtgctgtggaacctcgagttcgcgctgcagatgcaggacaccttcgacaacggcggcaagccgcccgaggtcgacgactacagcagcagcttcaccatcgcccagccgtccatggaggagagcctggcggccaacgccgcggcgctctcgctcatcagcgaggacatggacgaggaggacattgccaactccgtcatcttctcccagatcgctaaaccaaccggacgatgatgatcctctcttcacctcacctggatccatagcgtctccttctcgtgtaacagatgagatgagatgagatcaggtcgaacgtgatgtactcctccctacgtaccaccagcacacaagacagacatgcatgcatgcatgcagacggaaggcccgtcgatcggccggggtgggtgcatcggagactgtgtcgtacgtaccagctgctctatatactgtatgtatatgtatgtatgtatgtatgtatgtatgtatgtatgtatgtatacgttccccaattagtgtaaaggaaaacttgtaataccaactcgggtcttcttcaactgtggtgtggcatagattcatgatgtaatcaaatggaaatgggatgaaccagttaagcgaccagctagcaggcgataacgttcaaggcattgttcgaatttgctcggacttgttcttcacgcgggaaaactcgttatctacccattagtgtggttggttctggctagcggcgctgcagcatcgttccttttgaagttcctttttcaaggcattgctgttgaagaacccttctcattgtaggtagtagtctaaacgctctaatatatatttctttatggatggagtacttgtgatgagatggtcagtgcgcatatggttcctgctatagatttttttcttattgttttgatcactttgaagttctttttactccacaagggcatactttgatcttgtttgattttgtcagtcgtcggtgtgatttttatgtgtatgtgtgttgttgttgattgtgtgtatcttagctatgcagcaccgtgtgtgcttattctgtttgtatatccttagtgctctattttaaggcaataaaatccacccttcttggaaagaaaagcacctcaaacataatgagcattatgaccactactgccagcagaacaagccgccgacgcgccgcagtagccgctcccctactggacttggcttgaccttaccgatgacaaccaagaagtcttgttgcggatgcccctaaagaccaacgccctaaagtcgcactcatcgttgttgaatccttgaataga

SEQ ID NO: 158 - DNA, 2679 bp, Triticum aestivum
  source 1..2679: mol_type = unassigned DNA
atggcggccgcccgaggccgaggccgaggccgaggccgatgcgtccttctcgctgccgtcctcctcttgacggcggtggtcggcgcagacatatacaagccaacggactccattctggttcactgcgggtcggacaaggacgggcaggacgaggacggcaggaagtggaccaccgacaaggacagcaagtggctccccgacggcggcaagtcctccatcatgggcaccgccgacgtggcggacccgtcgctcccctcccccgtgccctacatgacggcgcgggtcttccccaaggagaccgcctacaccttccccgtggccgacgccgaccgccactgggtgcgcctccacttctacccggcggcctaccacggcatccccgccgaccacttcttcttctccgtcaccacctccaccggcgtcacgctgctgcgcaacttcagcgtctacatcaccgccaaggccctcacccaggcctacatcatccgggagttctccctccctccctccaccgtcggctcgctctccctcaaattcacgcccaccgccatgaacaacgcctcctacgccttcgtcaacggcatcgaggtcatctccatgcccagcttcttcggcgacccggccacactggtcggcctcaacgaccagtccctcgacgccagcgccgccaacctgcagaccatgtaccggctcagcgtcggcggctcctacatcccgcccgccaacgactccggcctgtcccgcgagtggttctccgacacgccctacgtctacggcgccgccacgggcgtcaccttcgaggccaacgacacggtcccgatcaagtacccggcccccgccgacgagtacgccgcgcccgtcagcatctacgactcgttccgccacatggggcgcgaccccaagatgaacaagaacaacaacctcacctgggtgttcgaggtggacggcaacttcacctacctcctccgcctccacttctgctcgctcatggaagacaagatcaaccaggtcgtcttcgccatcctcctcaacaacaagaccgccaccaccaccggcagcgccgacatcatcgcctgggccaaggagaagaaccctgctaatcccggcgcgcccggcaagggcgtgccggtcttcaaggactacgcggtgttcatgcccgccgccccggcgggcaacgacaccatcctctggctcacgctgcgcccggacaccgccaccagaacacagttcgtcaacgctttcctcaacggcctggaggtgtttaaggtgagcgacgcctccggcaacctggccggcccaaacccggacatctccaagatgctggcggaggccgagctgggggccgtggaggggcagttcagggagaagccgagcaacgtcggggcgctcatcggcggggcggcgggcggcgcggcggcgttcgggctggtggcggccgtgtgcttcgtggcgtaccagagcaagaggaggagggagctgagcagcagcccgtcacactcctcctccgggtggctgccggtgtacggcgggtcgacgagcgtgagcaagtcgtcgggcggcaggagcgcggcgacgctcaaccccaacatcacggccatgtgccggcacttctcgctccaggagataaagtcggcgaccaaggggttcgacgagtcgctggtgatcggcgtgggcgggttcggcaaggtgtaccgcggggtggtggacggggacaccaaggtggccgtcaagcggagcaacccgtcgtcggagcagggggtactggagttccagacggagatcgagatgctgtccaagctgcggcacaagcacctggtgtccctcatcggctgctgcgaggacaacggcgagatgatcctggtgtacgactacatggcgcacggcacgctgcgggagcacctgtacaacaagagcggcaagccgccgctgccgtggaggcagcggctggagatcgtcatcggcgccgcccgggggctgcactacctccacacgggcgccaagtacaccatcatccaccgggacgtcaagaccaccaacatcctggtggacgacaagtgggtggccaaggtgtccgacttcggcctctccaagacggggccgacggtgcagaaccagacgcacgtgagcaccatggtgaagggcagcttcgggtacctggacccggagtacttccggcggcagaagctgacggagaagtcggacgtctactcgttcggcgtggtgctgttcgaggtgctgtgcgggcggccggcgctgaacccgagcctgccgcgggagcaggtgagcctggcggaccacgcgctgagctgccagcggaagggcaccctggaggagatcgtggacccggtgctggaggggaagatcgcgcccgactgcctcaagaagttcgccgagacggcggagaagtgcctggcggaccagggcgtggaccggccgtccatgggcgacgtgctgtggaacctcgagttcgcgctgcagatgcaggacaccttcgacaacggcggcaagccgcccgaggtcgacgactacagcagcagcttcaccatcgcccagccgtccatggaggagagcctggcggccaacgccgcggcgctctcgctcatcagcgaggacatggacgaggaggacattgccaactccgtcatcttctcccagatcgctaaaccaaccggacgatga

SEQ ID NO: 159 - protein, 892 aa, Triticum aestivum
MAAARGRGRGRGRCVLLAAVLLLTAVVGADIYKPTDSILVHCGSDKDGQDEDGRKWTTDKDSKWLPDGGKSSIMGTADVADPSLPSPVPYMTARVFPKETAYTFPVADADRHWVRLHFYPAAYHGIPADHFFFSVTTSTGVTLLRNFSVYITAKALTQAYIIREFSLPPSTVGSLSLKFTPTAMNNASYAFVNGIEVISMPSFFGDPATLVGLNDQSLDASAANLQTMYRLSVGGSYIPPANDSGLSREWFSDTPYVYGAATGVTFEANDTVPIKYPAPADEYAAPVSIYDSFRHMGRDPKMNKNNNLTWVFEVDGNFTYLLRLHFCSLMEDKINQVVFAILLNNKTATTTGSADIIAWAKEKNPANPGAPGKGVPVFKDYAVFMPAAPAGNDTILWLTLRPDTATRTQFVNAFLNGLEVFKVSDASGNLAGPNPDISKMLAEAELGAVEGQFREKPSNVGALIGGAAGGAAAFGLVAAVCFVAYQSKRRRELSSSPSHSSSGWLPVYGGSTSVSKSSGGRSAATLNPNITAMCRHFSLQEIKSATKGFDESLVIGVGGFGKVYRGVVDGDTKVAVKRSNPSSEQGVLEFQTEIEMLSKLRHKHLVSLIGCCEDNGEMILVYDYMAHGTLREHLYNKSGKPPLPWRQRLEIVIGAARGLHYLHTGAKYTIIHRDVKTTNILVDDKWVAKVSDFGLSKTGPTVQNQTHVSTMVKGSFGYLDPEYFRRQKLTEKSDVYSFGVVLFEVLCGRPALNPSLPREQVSLADHALSCQRKGTLEEIVDPVLEGKIAPDCLKKFAETAEKCLADQGVDRPSMGDVLWNLEFALQMQDTFDNGGKPPEVDDYSSSFTIAQPSMEESLAANAAALSLISEDMDEEDIANSVIFSQIAKPTGR

SEQ ID NO: 160 - DNA, 4419 bp, Triticum aestivum
  source 1..4419: mol_type = unassigned DNA
aaaatagtttctttcgtatatcccattaaatggcatggggcccacaagtctgagacacgacgttgggaggcgtggcgacagcggccgaagtgatgaggcggggtagaagagccaagacggtgggaggcctctcgccggcacgacctcgcggttgttgttcggtggtgcaggaccgctttcctggagtttcaagcggttttcagcctgccaaattatatggaaagagctatcttgccgtaaaagtgagaggggccgtaaaaagaagttgggtttatgggagctgttgaaatgctatttttgtcttaacttatcgtaaacaatagtttattcaagattaggaaagctgttggagttgcttcaagtgactttgcattgaaaagggtcctctcttgtgttgcatggcatggcatggtctaaaagagggatggatcctctcctctcctaagcatgcggtgagccagaggtgatgcatggcttgcaagtgcctgccaaattaagtgaaaccacacatggcatgcagccctgccctgcctgcctgctgcatgcacgtcgttggtcaagctccctccctccggccttcccctagctttctctttctcttttcccttccctggaaggaactccaggagcaggagcaggaggagagggaggccctcctctgttcttctccctcctcaacatccttccttccatccattttaaatttaaaagttgccaccttcaaaaacctccatcgccgtgattgccacgtacgtcgttcctccatcatggcggccgcccgaggccgaggcgtccttctcgccgtcctcctcttgacgacggtggccttcgcgttcgtcggcgcggacatatacaagccaacggactccattctggttaactgcgggtcggacaaggacgggcaggacgaggacggcaggaagtggaccaccgacaaggacagcaagtggctccccgacggcggcaagtcctccatcatgggcaccgccgacgtgtcggacccgtccctcccctcccccgtgccctacatgacggcgcgggtcttccctaaggagaccgcctacaccttccccgtgtccgacgccgaccgccactgggtgcgcctccacttctacccggcggcttaccacgacatccccgccgaccacttcttcttctccatcagcacctccaccggcatcacgctgctgcgcaacttcagcgtctacatcaccgccaaggccctcacccaggcctacatcgtccgggagttctccctccctccctccaccgccggctcgctctccctcaaattcacgcccactgccatgaacaatgcctcctacgccttcgtcaatggcatcgagatcatctccatgcccaacttcttcggcgacccggccacgctggtcggcctcgacgaccagtccctcgacgccagcgccggcaacctgcagaccatgtaccggcttagcgtcggcggctcctacatcccgcccaccaacgactccgggctgacccgcgagtggttctccgacacgccctacgtctacggcgccggcacgggcgtcaccttcgaggccaacgacacgatcccgatcaagtacccggcccccgccgacgagtacgccgcgcccgtcagcatctatgacacgttccgccacatgggccgcgacgccaacctgaacaagaacaacaacctcacctgggtgttcgaggtggacggcaacttcacctacctcctccgcctccacttctgctcgctcatggaagacaagatcaaccaggtcgtcttcgccatcctcgtcaacaacaagacggccaccaccaccggcagcgccgacatcatcgcctgggccaaggagaagaaccctgctaatcccggcgcgcccggcaaaggcgtgccggtcttcaaggactacgccgtgttcatgcccgccgctccggcgggcaacgacaccatcctctggctcacgctgcgcccagacaccgccagtaacccacagttcgtcaacgctttcctcaacggcctcgagatctttaaggtgagcgacgcctccggcaacctggccggcccaaaccccgacatttctaagatgctggcggaggccgagctgggggccgtggacgggcagttcagggagaagccgagcaacgtcggggcgctcatcggcggggcggtgggcggcgcggcggcattcgggctggtcgcggccgtgtgcttcgtggcgtaccagagcaagagggggagggagctgagcagcagcccatcgcactcctcctccaggtggctgccggtgtacggcagctcgcagacgagcgtgagcaagtcgtcgggcgggaggagcgcgatgacgctgaaccccaacatcacggccatgtgccggcacttctcgttccaggagataaagtcggcgaccaaggggttcgacgagtcgctggtgatcggcgtgggcgggttcggcaaggtgtaccggggggtggtggacggggacaccaaggtggccatcaagcggagcaacccgtcgtcggagcagggggtgctggagttccagacggagatcgagatgctgtccaagctgcggcacaagcacctggtgtccctcatcgggtgctgcgaggacaacggcgagatgatcctggtgtacgactacatggcgcacggcacgctgcgggagcacctgtacaagagcggcaagccgccgctgccgtggaggcagcggctggagatcgtgatcggcgccgcccgggggctccactacctccacacgggcgccaagtacaccatcatccaccgcgacgtcaagaccaccaacatcctcgtcgacgagaagtgggtggccaaggtgtccgacttcgggctgtccaagacggggccgacggtgcagaaccagacgcacgtgagcaccatggtgaagggcagcttcgggtacctggacccggagtacttccggcggcagaagctgacggagaagtcggacgtctactcgttcggcgtggtgctgttcgaggtgctgtgcgggcggccggcgctgaaccctagcctgccgcgggagcaggtgagcctggcggaccacgcgctgagctgccagcggaagggcaccctggaggagatcatcgacccggtgctggaggggaagatcgcgcccgactgcctcaagaagttcgccgagacggcggagaagtgcctggcggaccagggcgtggaccggccgtccatgggcgacgtgctgtggaacctcgagttcgcgctgcagcagcaggacaccttcgagaacggcgggaagccgcccgaggtggacgactacagcagcagcttcaccatcaccccgccgtccatggaggagagcctggcggccaacgcggcggcgctgtcgctcatcagcgaggacatggacgaggaggacatcgccaacagcgtcatcttctcccagatcgcaaaacccaccggacgatgatcctttttttcaccttcacttcacgtctcgtctcgtgtaacagatgagatcagatcctagatcgatcagatcgaatgtgtatggttgtactcctccctacgtaccaccagcagacaagacagacatgcatggaaatgcatgcatgcagacggcccgtcgatcggccgggatgggtgcatcggagactgtgtcgtacgtatcagctgctctatatactgtatgtatgtatgtatatgtatatgttccccaattagtgtaaaggaaaacttgtaatacaaactcgagtcttcttcaactctggtgtggccgacgggtgtggttgatggatgtaaatggaaatgggatgaaccagccaagcgacccgcaggcgataacgttgaaggcattgttcgaattgttcggacttgttcttcaggggaaaagtcgttatctacacattagtggttggttccggcaatggcggcgctttagcaccattccttttttaaggcgttgctgtagaaaaatacttttcattgtactccctacataaagaaatataaaagcgtttggatcattactttagtgatctaaccattcttatatttttttatggagggagtacttgtgatgtcaagagatggtcaatgcgcatgcggttcctgctatagattttttcctcattgttttgatcactttgaagttctttctactccaccagggcataactttgatcttgtttgactttgtcagtcgttgttgtgattttttatgtgtatgtgtgtcgttgttgcttctgtttatcttagttatgcaacatcgtgtgcttattctgtttgtatcttctgtgctcaatttgaaggcaataaaatctacccttgttggaaagaaaagcacctcaaacataatgagtattatgaccactaccgctgcaagagcaagcggctggcgcgccctagttgtggctcccctaccggacttggcttgaccttatcgataaaca

SEQ ID NO: 161 - DNA, 2670 bp, Triticum aestivum
  source 1..2670: mol_type = unassigned DNA
atggcggccgcccgaggccgaggcgtccttctcgccgtcctcctcttgacgacggtggccttcgcgttcgtcggcgcggacatatacaagccaacggactccattctggttaactgcgggtcggacaaggacgggcaggacgaggacggcaggaagtggaccaccgacaaggacagcaagtggctccccgacggcggcaagtcctccatcatgggcaccgccgacgtgtcggacccgtccctcccctcccccgtgccctacatgacggcgcgggtcttccctaaggagaccgcctacaccttccccgtgtccgacgccgaccgccactgggtgcgcctccacttctacccggcggcttaccacgacatccccgccgaccacttcttcttctccatcagcacctccaccggcatcacgctgctgcgcaacttcagcgtctacatcaccgccaaggccctcacccaggcctacatcgtccgggagttctccctccctccctccaccgccggctcgctctccctcaaattcacgcccactgccatgaacaatgcctcctacgccttcgtcaatggcatcgagatcatctccatgcccaacttcttcggcgacccggccacgctggtcggcctcgacgaccagtccctcgacgccagcgccggcaacctgcagaccatgtaccggcttagcgtcggcggctcctacatcccgcccaccaacgactccgggctgacccgcgagtggttctccgacacgccctacgtctacggcgccggcacgggcgtcaccttcgaggccaacgacacgatcccgatcaagtacccggcccccgccgacgagtacgccgcgcccgtcagcatctatgacacgttccgccacatgggccgcgacgccaacctgaacaagaacaacaacctcacctgggtgttcgaggtggacggcaacttcacctacctcctccgcctccacttctgctcgctcatggaagacaagatcaaccaggtcgtcttcgccatcctcgtcaacaacaagacggccaccaccaccggcagcgccgacatcatcgcctgggccaaggagaagaaccctgctaatcccggcgcgcccggcaaaggcgtgccggtcttcaaggactacgccgtgttcatgcccgccgctccggcgggcaacgacaccatcctctggctcacgctgcgcccagacaccgccagtaacccacagttcgtcaacgctttcctcaacggcctcgagatctttaaggtgagcgacgcctccggcaacctggccggcccaaaccccgacatttctaagatgctggcggaggccgagctgggggccgtggacgggcagttcagggagaagccgagcaacgtcggggcgctcatcggcggggcggtgggcggcgcggcggcattcgggctggtcgcggccgtgtgcttcgtggcgtaccagagcaagagggggagggagctgagcagcagcccatcgcactcctcctccaggtggctgccggtgtacggcagctcgcagacgagcgtgagcaagtcgtcgggcgggaggagcgcgatgacgctgaaccccaacatcacggccatgtgccggcacttctcgttccaggagataaagtcggcgaccaaggggttcgacgagtcgctggtgatcggcgtgggcgggttcggcaaggtgtaccggggggtggtggacggggacaccaaggtggccatcaagcggagcaacccgtcgtcggagcagggggtgctggagttccagacggagatcgagatgctgtccaagctgcggcacaagcacctggtgtccctcatcgggtgctgcgaggacaacggcgagatgatcctggtgtacgactacatggcgcacggcacgctgcgggagcacctgtacaagagcggcaagccgccgctgccgtggaggcagcggctggagatcgtgatcggcgccgcccgggggctccactacctccacacgggcgccaagtacaccatcatccaccgcgacgtcaagaccaccaacatcctcgtcgacgagaagtgggtggccaaggtgtccgacttcgggctgtccaagacggggccgacggtgcagaaccagacgcacgtgagcaccatggtgaagggcagcttcgggtacctggacccggagtacttccggcggcagaagctgacggagaagtcggacgtctactcgttcggcgtggtgctgttcgaggtgctgtgcgggcggccggcgctgaaccctagcctgccgcgggagcaggtgagcctggcggaccacgcgctgagctgccagcggaagggcaccctggaggagatcatcgacccggtgctggaggggaagatcgcgcccgactgcctcaagaagttcgccgagacggcggagaagtgcctggcggaccagggcgtggaccggccgtccatgggcgacgtgctgtggaacctcgagttcgcgctgcagcagcaggacaccttcgagaacggcgggaagccgcccgaggtggacgactacagcagcagcttcaccatcaccccgccgtccatggaggagagcctggcggccaacgcggcggcgctgtcgctcatcagcgaggacatggacgaggaggacatcgccaacagcgtcatcttctcccagatcgcaaaacccaccggacgatga

SEQ ID NO: 162 - protein, 889 aa, Triticum aestivum
MAAARGRGVLLAVLLLTTVAFAFVGADIYKPTDSILVNCGSDKDGQDEDGRKWTTDKDSKWLPDGGKSSIMGTADVSDPSLPSPVPYMTARVFPKETAYTFPVSDADRHWVRLHFYPAAYHDIPADHFFFSISTSTGITLLRNFSVYITAKALTQAYIVREFSLPPSTAGSLSLKFTPTAMNNASYAFVNGIEIISMPNFFGDPATLVGLDDQSLDASAGNLQTMYRLSVGGSYIPPTNDSGLTREWFSDTPYVYGAGTGVTFEANDTIPIKYPAPADEYAAPVSIYDTFRHMGRDANLNKNNNLTWVFEVDGNFTYLLRLHFCSLMEDKINQVVFAILVNNKTATTTGSADIIAWAKEKNPANPGAPGKGVPVFKDYAVFMPAAPAGNDTILWLTLRPDTASNPQFVNAFLNGLEIFKVSDASGNLAGPNPDISKMLAEAELGAVDGQFREKPSNVGALIGGAVGGAAAFGLVAAVCFVAYQSKRGRELSSSPSHSSSRWLPVYGSSQTSVSKSSGGRSAMTLNPNITAMCRHFSFQEIKSATKGFDESLVIGVGGFGKVYRGVVDGDTKVAIKRSNPSSEQGVLEFQTEIEMLSKLRHKHLVSLIGCCEDNGEMILVYDYMAHGTLREHLYKSGKPPLPWRQRLEIVIGAARGLHYLHTGAKYTIIHRDVKTTNILVDEKWVAKVSDFGLSKTGPTVQNQTHVSTMVKGSFGYLDPEYFRRQKLTEKSDVYSFGVVLFEVLCGRPALNPSLPREQVSLADHALSCQRKGTLEEIIDPVLEGKIAPDCLKKFAETAEKCLADQGVDRPSMGDVLWNLEFALQQQDTFENGGKPPEVDDYSSSFTITPPSMEESLAANAAALSLISEDMDEEDIANSVIFSQIAKPTGR

SEQ ID NO: 163 - DNA, 4491 bp, Triticum aestivum
  source 1..4491: mol_type = unassigned DNA
aacagtgaaatccccaactctctccgtgggtccttgagttgattagaatttcgaggatcgcaaattgaaatgtaataaaatatgatatgcatgaatgatctatatataacattccaaattggatatttgggatgttacagtggctgttgggtggtgggggccgctttcttggagtttcaagcggttttcagcctaccaaatcaaattatatggaaagaagtatcttgccgtaaaagtgagaggagttgggggcaattatacgggattccgtaagaagaagttgggtttatgggagctgttcaagtgctatttttgtcttaaacaacccatagtttattcaaggatacgaaagctgttggagttgcttcaagtgactttccattgaaaagggtcctctcttctcttgtgttgcatggcatggcatggtctaaattaaaagagggatggatcctctcctctcctaagcatgcggtgagccagagaggatgcatggcttgcaagtgcctgccaaattaagtgaaaccacacatggcatgcagccgttggcgccaaaacgctcttgccctgccctgcctgcctgctgcatgcatgtccctccctcctcaacgcccgtcgttggtgaagctccctccctccgcccttcccctagctttctctttctctttctcttttcccttccctggaaggaactccaggagcaggagcaggaggagagggaggccctcctctgttcttctccctcctcaacatccttccatccattcaatttaaactgaagttgccacctcaaaaaacctccatcgccgtgattgcccggtacgtacgtcgtccctcatggcggccgcccgaggccgaggcgtccttctcgccgtcctcctcttgatgatggtggcgtttgcgttcgtcggcgcagacatatacaagccaacggactccattctggttcactgcgggtcggacaaggacgggcaagacgaggacggcaggaagtggaccgccgacaaggacagcaagtggctccccgacgggggcaagtcctccgtcatgggcaccgccgacgtgccggacccgtcgctcccctcccctgtgccctacatgacggcgcgggtcttccccaaggagaccgcctacaccttccccgtggccgacgccgaccgccactgggtgcgcctccacttctacccggcggcctaccacggcatccccgccgaccacttcttcttctccgtcaccacctccaccggcgtcacgctgctccgcaacttcagcgtctacaccaccgccaaggccctcacccaggcctacatcgtccgggagttctccctccctccctccaccaccggctcgctctccctcaaattcacgcccaccgccatgaacaacgcctcctacgccttcgtcaacggcatcgagatcatctccatgcccagcttcttcggcgacccggccacgctggtcggtctcgacgaccagtccctcgacgccagcgccggcaacctgcagaccatgtaccggctcagcgtcggcggctcctacatccctcccgccaacgactccgggctgtcccgtgagtggttctccgacacaccctacgtctacggcgccgccacgggcgtcaccttcgaggccaacgacacgatcccgatcaagtacccgacccccgccgacgagtatgccgcgcccgtcagcatctacgactcgttccgccacatggggcgcgaccccaagatgaacaggaacaacaacctcacctgggtgttcgaggtggacggcaacttcacctacctcctccgcctccacttctgctcgctcatggaagacaagatcaaccaggtcgtcttcgccatcctcgtcaacaacaagacggccaccaccaccggcagcgccgacatcatcgcctgggccaaggagaagaaccctgctaatcccggcgcgcccggcaaaggcgtgccggtcttcaaggactacgccgtgttcatgcccgccgctccggcaggcagcgacaccatcctctggctcacgctgcgcccagacaccgccaccaatccacagttcgtcaacgctttcctcaacggcctggaggtctttaaggtgagcgacgcctccggcaacctggccggcccaaaccccgacatctccaagatgctggcggaggccgagctgggggccgtggacgggcagttcagggagaagccgagcaacgtcggggcgctcatcggcggggcggcgggcggcgcggcggcgttcgggctggtggcggccgtgtgcttcgtggcgtaccagagcaagaggaggagggagctgagcagcagcccgtcgcactcctcctccgggtggctgccggtgtacggcggcaactcgcagacgagcgtgagcaagtcgtcgggcggcaggagcgcggtgacgctgaaccccaacatcacggccatgtgccggcacttctcgttccaggagataaagtcggcgaccaaggggttcgacgagtcgctggtgatcggcgtgggcgggttcgggaaggtgtaccggggggtggtggacggggacaccaaggtggccatcaagcggagcaacccgtcgtcggagcagggggtgctggaattccagacggagatcgagatgctgtccaagctgcggcacaagcacctggtgtccctcatcgggtgctgcgaggacaacggcgagatgatcctggtgtacgactacatggcgcacggcacgctgcgggagcacctgtacaagagcggcaagccgccgctgccgtggaggcagcggctggagatcgtgatcggcgccgcccgggggctccactacctccacacgggcgccaagtacaccatcatccaccgcgacgtcaagaccaccaacatcctggtggacgagaagtgggtggccaaggtgtccgacttcgggctgtccaagacggggccgacggtgcagaaccagacgcacgtgagcaccatggtgaagggcagcttcgggtacctggacccggagtacttccggcggcagaagctgacggagaagtcggacgtctactcgttcggcgtggtgctgttcgaggtgctgtgcgggcggccggcgctgaacccgagcctgccgcgggagcaggtgagcctggcggaccacgcgctgagctgccagcggaagggcaccctggaggagatcatcgacccggtgctggaggggaagatcgcgcccgactgcctcaagaagttcgccgagacggcggagaagtgcctggcggaccagggcgtggaccggccgtccatgggcgacgtgctgtggaacctcgagttcgcgctgcagcagcaggacaccttcgagaacggcgggaagccgcccgaggtggacgactacagcagcagcttcaccatcaccccgccgtccatggaggagagcctggcggccaacgcggcggcgctctcgctcatcagcgaggacatggacgaggaggacatcgccaacagcgtcatcttctcccagatcgcaaaacccaccggacgatgatcttcactccacttcgcttcacttcacttgatgcacggacgtctcgtctcgtgtaacagatgagatcagatcctagatcagatcgaatgtgttgtagtacccctccctacgtaccaccagcacacaagacagcagacatgcatgcattcatggaaatgcatgcatgcagacggcccgtcgatcggcctgggtgggtgcatcggagactgtgtcgtacgtaccagctgctctatatactgtatgtatatgtatgtatgtatatgttccccaattagtgtaaaggaaaacttgtaatacaaactcgagtcttcttcaacttcaactgtggtgtggccgaccggcgtgggtgatagatgtaaatggaaatgggaagcagttgataacgttcaaggcattgttcgaatttgctcggacctgtttcttcacgctgaaagacttgttatctacccattagtggttggttccggcaatgacggcgccttagcatcgttcccaatcattctcgttgtattccctctgcaaagagatggtcggtgagcatatggttcccgctatagcttttttctctctcattgttttgatcactttgaagttctttttactccaccagggcatattttttttatcttgtttgattttggtgtgatttttatgtgtatgcgtgttgttgttgttgttgcttgtatgtattttagctatgtagcaccgtgtgcttattctgtttgtatctccttgatgctctattttaaggaaataaaatccacccttgcgggaaagaaaagcacctcaatcataatgagcattatgatcactatcgccatcagaacaagccgccaacgcgccgcagtagccgctcccctaccggagttggcttgatcttatcgatgacaaccaagaagtctcgtgcacatgcccctaaggaccagcgccctagagtcgcagtcgtcgttgttgatcgtcgttgttgaacccttgaatagatct

SEQ ID NO: 164 - DNA, 2673 bp, Triticum aestivum
  source 1..2673: mol_type = unassigned DNA
atggcggccgcccgaggccgaggcgtccttctcgccgtcctcctcttgatgatggtggcgtttgcgttcgtcggcgcagacatatacaagccaacggactccattctggttcactgcgggtcggacaaggacgggcaagacgaggacggcaggaagtggaccgccgacaaggacagcaagtggctccccgacgggggcaagtcctccgtcatgggcaccgccgacgtgccggacccgtcgctcccctcccctgtgccctacatgacggcgcgggtcttccccaaggagaccgcctacaccttccccgtggccgacgccgaccgccactgggtgcgcctccacttctacccggcggcctaccacggcatccccgccgaccacttcttcttctccgtcaccacctccaccggcgtcacgctgctccgcaacttcagcgtctacaccaccgccaaggccctcacccaggcctacatcgtccgggagttctccctccctccctccaccaccggctcgctctccctcaaattcacgcccaccgccatgaacaacgcctcctacgccttcgtcaacggcatcgagatcatctccatgcccagcttcttcggcgacccggccacgctggtcggtctcgacgaccagtccctcgacgccagcgccggcaacctgcagaccatgtaccggctcagcgtcggcggctcctacatccctcccgccaacgactccgggctgtcccgtgagtggttctccgacacaccctacgtctacggcgccgccacgggcgtcaccttcgaggccaacgacacgatcccgatcaagtacccgacccccgccgacgagtatgccgcgcccgtcagcatctacgactcgttccgccacatggggcgcgaccccaagatgaacaggaacaacaacctcacctgggtgttcgaggtggacggcaacttcacctacctcctccgcctccacttctgctcgctcatggaagacaagatcaaccaggtcgtcttcgccatcctcgtcaacaacaagacggccaccaccaccggcagcgccgacatcatcgcctgggccaaggagaagaaccctgctaatcccggcgcgcccggcaaaggcgtgccggtcttcaaggactacgccgtgttcatgcccgccgctccggcaggcagcgacaccatcctctggctcacgctgcgcccagacaccgccaccaatccacagttcgtcaacgctttcctcaacggcctggaggtctttaaggtgagcgacgcctccggcaacctggccggcccaaaccccgacatctccaagatgctggcggaggccgagctgggggccgtggacgggcagttcagggagaagccgagcaacgtcggggcgctcatcggcggggcggcgggcggcgcggcggcgttcgggctggtggcggccgtgtgcttcgtggcgtaccagagcaagaggaggagggagctgagcagcagcccgtcgcactcctcctccgggtggctgccggtgtacggcggcaactcgcagacgagcgtgagcaagtcgtcgggcggcaggagcgcggtgacgctgaaccccaacatcacggccatgtgccggcacttctcgttccaggagataaagtcggcgaccaaggggttcgacgagtcgctggtgatcggcgtgggcgggttcgggaaggtgtaccggggggtggtggacggggacaccaaggtggccatcaagcggagcaacccgtcgtcggagcagggggtgctggaattccagacggagatcgagatgctgtccaagctgcggcacaagcacctggtgtccctcatcgggtgctgcgaggacaacggcgagatgatcctggtgtacgactacatggcgcacggcacgctgcgggagcacctgtacaagagcggcaagccgccgctgccgtggaggcagcggctggagatcgtgatcggcgccgcccgggggctccactacctccacacgggcgccaagtacaccatcatccaccgcgacgtcaagaccaccaacatcctggtggacgagaagtgggtggccaaggtgtccgacttcgggctgtccaagacggggccgacggtgcagaaccagacgcacgtgagcaccatggtgaagggcagcttcgggtacctggacccggagtacttccggcggcagaagctgacggagaagtcggacgtctactcgttcggcgtggtgctgttcgaggtgctgtgcgggcggccggcgctgaacccgagcctgccgcgggagcaggtgagcctggcggaccacgcgctgagctgccagcggaagggcaccctggaggagatcatcgacccggtgctggaggggaagatcgcgcccgactgcctcaagaagttcgccgagacggcggagaagtgcctggcggaccagggcgtggaccggccgtccatgggcgacgtgctgtggaacctcgagttcgcgctgcagcagcaggacaccttcgagaacggcgggaagccgcccgaggtggacgactacagcagcagcttcaccatcaccccgccgtccatggaggagagcctggcggccaacgcggcggcgctctcgctcatcagcgaggacatggacgaggaggacatcgccaacagcgtcatcttctcccagatcgcaaaacccaccggacgatga

SEQ ID NO: 165 - protein, 890 aa, Triticum aestivum
MAAARGRGVLLAVLLLMMVAFAFVGADIYKPTDSILVHCGSDKDGQDEDGRKWTADKDSKWLPDGGKSSVMGTADVPDPSLPSPVPYMTARVFPKETAYTFPVADADRHWVRLHFYPAAYHGIPADHFFFSVTTSTGVTLLRNFSVYTTAKALTQAYIVREFSLPPSTTGSLSLKFTPTAMNNASYAFVNGIEIISMPSFFGDPATLVGLDDQSLDASAGNLQTMYRLSVGGSYIPPANDSGLSREWFSDTPYVYGAATGVTFEANDTIPIKYPTPADEYAAPVSIYDSFRHMGRDPKMNRNNNLTWVFEVDGNFTYLLRLHFCSLMEDKINQVVFAILVNNKTATTTGSADIIAWAKEKNPANPGAPGKGVPVFKDYAVFMPAAPAGSDTILWLTLRPDTATNPQFVNAFLNGLEVFKVSDASGNLAGPNPDISKMLAEAELGAVDGQFREKPSNVGALIGGAAGGAAAFGLVAAVCFVAYQSKRRRELSSSPSHSSSGWLPVYGGNSQTSVSKSSGGRSAVTLNPNITAMCRHFSFQEIKSATKGFDESLVIGVGGFGKVYRGVVDGDTKVAIKRSNPSSEQGVLEFQTEIEMLSKLRHKHLVSLIGCCEDNGEMILVYDYMAHGTLREHLYKSGKPPLPWRQRLEIVIGAARGLHYLHTGAKYTIIHRDVKTTNILVDEKWVAKVSDFGLSKTGPTVQNQTHVSTMVKGSFGYLDPEYFRRQKLTEKSDVYSFGVVLFEVLCGRPALNPSLPREQVSLADHALSCQRKGTLEEIIDPVLEGKIAPDCLKKFAETAEKCLADQGVDRPSMGDVLWNLEFALQQQDTFENGGKPPEVDDYSSSFTITPPSMEESLAANAAALSLISEDMDEEDIANSVIFSQIAKPTGR

SEQ ID NO: 166 - DNA, 22 bp, Triticum sp.
  source 1..22: mol_type = unassigned DNA
gtcgcccctcctgaggcggcgg

SEQ ID NO: 167 - DNA, 22 bp, synthetic construct
  misc_feature 1..22: note = Description of Artificial Sequence: Syntheticoligonucleotide
  source 1..22: mol_type = other DNA
gtcgcccctcctgaggcagcag

SEQ ID NO: 168 - DNA, 23 bp, Triticum sp.
  source 1..23: mol_type = unassigned DNA
ggatggccaatgcgagatgatgg

SEQ ID NO: 169 - DNA, 23 bp, synthetic construct
  misc_feature 1..23: note = Description of Artificial Sequence: Syntheticoligonucleotide
  source 1..23: mol_type = other DNA
ggatggccaatgcgagacgacgg

SEQ ID NO: 170 - DNA, 19876 bp, Hordeum vulgare
  misc_difference 6517..6640: note = a, c, t, g, unknown or other
  misc_difference 7114..7260: note = a, c, t, g, unknown or other
  misc_difference 9369..9509: note = a, c, t, g, unknown or other
  misc_difference 13668..13791: note = a, c, t, g, unknown or other
  misc_difference 14237..14401: note = a, c, t, g, unknown or other
  misc_difference 15077..15199: note = a, c, t, g, unknown or other
  source 1..19876: mol_type = unassigned DNA
gaccgtgacgagcagcaaagcagaattggtggaggctgtaattctttctgcacacaaatacgttttttacctacccgtgctgaaagcaatgggtcatacatgtcagtctaactttgactgtcgcgtgagacggctgcacggtgataaaagagcaggtttgtggtccaacggcccgccactacgctcggcccaccggccagagagagaaacgcgtccccgggaggccggggcagaggtagcttcagcatttccgccgcctcaacccctccgatcgcgccagcgtgtcccccctcgccctagggaagggaggctgggccgtcggatccgggtataagtagcgacgcgcacgcgagccgtgcctattcctgtacttgcctccccgaccacctcccccgtttggttccgccattccattccagcgcaggacggcgggacgcgcgaggcggaggcggaggcggaggcggaagggaagcggagcgcgctcgcggccgctcgcgctagggttcgtccgcgccctctccccccctctctatcccgtccgaatcgaccggccctggctagctggcgctgacccgctgccccgaatgcaggcggaagcccccgagatcgcgaggtggtggaggcggagatgacgacgccgcgcggtggcgaggatgtgccatcgtcgacggcgtcggccgccgccgccgccgcttcgacgaccgagcccaacacgccgacgtcggcgcacacgtcggggctcaaccggcgggggtcgaggagcgccgccatggccgccttctccatggaggtcttcgacaacgaggtggtgccgtcctcgctcagcagcatcgccccgatcctgcgcgtcgccgccgagatcgagcccgagcgcccccgcgtcgcctacctctgtaagttcgtcgcactcccaagccgtccgcgcgcgtgccgcctattttgggagattttcgacgccttttcctggcacccagcttggcgcatttcgtgcctcggccggacgaaacgggcaactcgtggtgatatgtttggcgactgataaatgtcccactgcccacagccgttgtagcgtttatttgggaggttttgtgctcaggaatctcgaaaaatctatgccgcgtgcgtcggtggttgtttttttgttcctgggctgctttgattggtacgagtttaaggggcatgtctgagatttctccgcgtatgttggttttgctgcgttagctggatcttcggctttgatatgtttgtccatggtagtcgtgaagtagctagcttctctcatgtatgcaccttgaggtgttcgtatatgatcgtatcagatattcagatgagatggcttgtgtttaaggggcatgtctgagtctctgagatttgtctgcgtatgttggttttgctgcgttagctggatcttcggctttgatatgtttctccttactcgtgaagctgatcctagaagtagctagcttctcctgctgtatgcaccatggggtgttcgtatatgatcgtatcagatgaggttcagttggtgcagtttacagttgtgttgcttttgctcgaatgttcgaatcatttagggtagatagctctgctcgatcgaccggtttgcttggaaagttggaataccatatatcaggtagctcgtgttgattcttcggtttctctatgtgagatttctcctcctatgtcgacctacctgtacatgctgtgctagattttggattttgtgtatgtttctcctattttcagtagctaattttgtggcaggttttcttctgtatgcttgcattattcgtaccaaaccaaattactcctgttttttggagtgcagagctgcagatttgattcattcgatggcttttccgacagttctccctcgttttgattgactatgagcgctctgtgtgttgtttgaatcatgtcagatatgacagttttgctccaccagcttttttccgaagaagtgcatatcacgtagtacgaatgggtgcttctggttcaccctttttcgggatctcacgttgatctgttactctgcgaactaggtcggttctacgccttcgagaaggcgcacaggctggatcaaaactccgttggtcgtggcgtccggcagttcaaaacgtccctgcttcaacgcttagagaaggtgtgagacgtctttctctgtctcttcccctccataatttctgcatgatctagctgacttggcgtacatgagggtttgttttgttagttgatacatgtcgatttggtcatgttccctcgctggttttgactgggtgactgtatctggccttcatagatatattatgcaagttcccctaaaaaggatatgctagttgttgaattattattactactatcttagcttttaaactgcttgcaggatatataggtaatatatgagtttgtttggctaataagcctcatggagttaaaaccaagctggaagctaatatggacgacactaccttaatttagttgtcaatgtagtagtggtccgggttatgttgtccaaatgcctacagtatgcaacatgcatgcagtgtaagccatgaaagtatttcctacttttcatttttgtgttgtaatatacatcttgcagatacacgatttttaacttgaagagtatggccgttggactttagttcagtacacatttgtttcatgataagcttaccaactccatttccaaatacatgacgtagaaagcatgtggtcaaactttacctttgaccattagtcaaatcaaattatttagtttttctttgatagaaattgtagcattaggtttgtaattcagaacagtttcactgtatatactttttaattatatatgttgtgcactgaagactcaaaatgcaaaacattatctatcttagaatggtgggagtatatttgattattagtgataagttgataactgtcgatagtcaatctggaaattttattgtgatcatcttaatttgatgaccatattgggagttgtgatcagctaatcaaacctgcaagctcatttaatcctacctaacagataaagaacactgttctattaatagaatagtgtgcttccctttattgtgattatcttaatttttaaccacattgggagttgtgatcagccaagcaaacctacaagctcacttgatcctacctgattaggtaaacaacattgtgccagtaatagaatgttgtgcttcgttctacttatttcgtttcaaagtcacaactaaaccttcagttcagattcaacatttgtttcgtgtttctgctggggagggcgatgaggtaaactgatttcagataacaccatcctcctcatgattcgtctcaattgatcagtttgcaatggcagattcttgtttgttagagatatactgaggtagccacattctcatctgagcttattttttcagatgatccagttcaaatttagtactttgttgtttcctacttgaaaagttgaaatggccagcaaatgtagtaggaatgaggaaaaggagcagggacttagggttcccttgtttttttaaatcagattttgcctaacctactcttgaatccaaagatcctaccttaaattttcccatttcgctcctatgcaatccaacaggacaatagcccgagtctcgcaaagcgattgaagaaagccgatgcccgcgaaattgagagtttttatcaagaatactatgagaactatgtccgcaccctcgacaaaggggaacaagccgacaggtaattcccagtccctaacctgtgctgcgatctcctctataagcccaatccctcgctatcatgaatccggccccatgacattgtcgcctccaggactcaacttgggaaggcctaccagacggctggagtcctcttcgaggtgctctgcgccgtcaacaagaatgagaaggttgaggaagttaaccccgaggtttgtgctcactccagccaactgcagtcattctttctcagcagaaatctaggttccctctaatgcatcgagtttctccaaatttcctctgcagattatgcgctggcacactgaggtgcaagaaaagaaagacatctatgcgccgttcaatattctgcctctcgatgcggccagtgcatcccagtccatcatgcagctagaggaggtatacgactcacaacaatgcagcctgtttcctgaaaaaaggaacaattgcatcatgtactggttcaatgaaataaactgacgtggtcatcgaatgcatcattaatagataaaagcagcagtcgcagctctgcggtacacacggggtttgacctggccttctgcatttgagccggaaaggcagaaggggggtgagctcgatttgctcgattggttgagagctatgtttggctttcaggtctgctaccaactccaggcgaaccaatttcgattggcccattgtattactataagctaacactagtttatcttcttgtgtgcagcgggacagtgtcaggaatcaacgggagcatttgattcttctcctcgctaatgtgcacattagacttgagccaaagcctgaaccacttagcaaggcacactcctctaccgatatttactttcacagcttgacttcaggaatatcaatgtgataagcataagatcagttggttttgcatggataaagtgtggtggtgacagaacaggatatttgtctgaatttataatattttagaaaaaataaagttatttttcattggattagtaaccaattatttaccttcaacgttatgttgtgattgctggtgtaacttgccataacatacagatgcattttaatttctttcttgatactacttttgatttccatattcttgacattagaatttgctggactggtgccactactgcaaaaatgccagctgacttattggcattccaccacgaattcgattgattaaactttctgtatgcattattctgaagcaagtgtatagctaaataattttaattgcaccctccatttaccatgctttccttctctcctttttgttcatccttgcttgatgattgatctgatccattctttcacccctgaaacagctggatgaccgagctgttgatgtagtgatgaacaagttgttcaacaactacaagaagtggtgcaaatttttatcacggaaacatagtctgaggtatataattccttaattagtttcctatttatgtacattattgtgctgataatcttgcaactgcagaaatcctccgggtgctcaattacaggaagttcagcaacgcagaattttgtacctaggtctttatcttcttatctggggcgaatcagcaaatatccggtttatgccagagtgtctttgctacatttttcacaatgtaatttacacattcttattatcatatcaagtaccaaatctcatggcaaaaatatatctttgaatgagtcttctcaatgtgttcagatggcatatgagttgcatgggttgcttgctggaaatgttagtattgtgactggtgaaaatatcaggccatcttatggtggcgatgaggaggctttcttaaagaaagtggtcacacctatctatcgtgtcatcaaaaaggtactttgataaattaccattacctgaaattccaagttagtttgttctaaatatagttgtggtggtttttcaggaggcaggaaaaagtcaacatggaaaaacagcacattcagcatggtgtaattatgatgatctaaatgagtacttctggtctgtttacagccctattttctggtcacatgctgacagccttttcacactttctctgatagaccctactctgtttcaggacacctgattgtttctcactgggatggccaatgcgagatgatggcgacttcttcaaatccgtgcacgattcaaggcctgtagctgtggtacagttcgatatcagtctgtcagtatcccttccaaagactttgattaggaggagaatactgacaaataactatttataggctggaagctcctcaccaaagggttctagtaaaagcacagggaagacaaattttgtagagactagatcgttttggcacatctttcgtagttttgaccgaatgtggaccttctatctgttggctctacaggtactgtgccaaatttttcgattttgtttctctgtactatgatttttgatggtttgacactctgaatgtgaatcttataatttttaaaccgaacaggcaatgttgatttttgcttggagtgaatatacagtgactcaaatccttcggaaggacctcttatattctctatcaagcatatttgtcacagcagcatttttacagttcctccaaagtatgtttcccatttcaaatacttgtttcatatactaggcattttctgatgcatgtaatctttccttttattttttgagaacctgaaatttttagtatgacaactgataaatattggcataatttagttccctttatgtatgtactaccttctgcttttgtcaatggcattacgataagacattaggatctaccttccctttatgtatgtactnnnnnnnnnnnnnnnnnnnnnnnnnnnnnnnnnnnnnnnnnnnnnnnnnnnnnnnnnnnnnnnnnnnnnnnnnnnnnnnnnnnnnnnnnnnnnnnnnnnnnnnnnnnnnnnnnnnnnnnnnnnnccctttatgtatgtactgttaagctaggttcccgcgatacagagtaccttcacagcagaaagcaactggcaagaacattcatgtagatatctgcaactttaggatctcttctcatatgcattaaactagtgttactataccgagcagtcatgttcttgagatgctctccagtcttaaattcctgtggtcttgtgtgaggctgatattttctttaatttgatggcaggtattttagactttattctgaactttcctggccacattagatgcaagttcattgacgtcgtgagaaatattctgaagatagtagttagtgccgcgtgggctgtgattcttcccgttttctacatcagcagtcaaacaaaagtcaatttaccactgaaaaatctggacagatggtttggttatgtgaaaggagtgccacaactatatatcctggctgtggcggtgtacctgatacctaatatcattagnnnnnnnnnnnnnnnnnnnnnnnnnnnnnnnnnnnnnnnnnnnnnnnnnnnnnnnnnnnnnnnnnnnnnnnnnnnnnnnnnnnnnnnnnnnnnnnnnnnnnnnnnnnnnnnnnnnnnnnnnnnnnnnnnnnnnnnnnnnnnnnnnnngctcttcctgtttccgatgttccgaaggtggatagagaactcggattggcatattgttagactgctactgtggtggtctcaggtattcaattcaatctattttatttatttatgttttattatatggaaaattacttatgcagcttatcctcgttgtaaatattcatttcaaaatttcttctatgaggcaatttttaataaggtaatactttgataagagggaactgtatttttaagaatgaatttgtcttgatatccttgccagcttgttgtttgtcatagtatcctagagggttgagaaactagtgataaaattgtaaactgtaacttgtaagaagagaaaataatccaatgacttctgatgcccgggcagagaattaccctaccattttttcattagtttgaaaaaaagcattgtatgattatcgaaaagttctacgatgcttgtgaaaattggtagttttcacttctctaacaatatgtgttcaactgaacgcatttgctatccaagtaatgaaaatgatattgcaagggtacagatggacaaaacagggtggaaaacgtgaaggtaatagattattatttatgcaatgcgtggaagtaaaataactggatgaattttcctggttcataaggcgctgcacatttattcatttttcatatttctttcttgtgcggcttgatacactacactaatggcaatgcccattttccttgttcttgctgtacacgctaattgtataaataactgcagaaacgaatttatgttggccgtggaatgcatgaaagtcaagctgttcttctgaagtaagttactctgttctgtttttcttctgttagagctttattctgcggaaaaaactcaattctcttctattcaactgagaaggtacacattattttggattttgctgctatgctccaagctttccttcagttactttgtccaggtaagttctatgcttagttatttgcaagcatgctttgatgagattgatctgaagcggtttaatttgcagatacaacctcttataaggcctaccaaggatataatgagtgttcataacattcgttatgagtggcatgagttttttccaaacggtaattccaatgctttttttggtgctgccttcattctggaaccctttttttactgataattcgttgccttttcagcatcttataatatcgctgctatcctatccctctgggcccctgttctgttggtatgctcttatccagcttgctagtgcaatgcatatccagcttatgcattagctgaaaattagcttcattattctcatttgtttcgaaactgcattctaaatcttggtttatcaactacaatgcttttattctcgtaggtctacttgatggatacacagatatggtacgccattttctctacaatatccggcggtatgtctggggcacttggacgacttggggaggtaatgatatatctgaactattatctgtaacatgttcttttgcttagtagtttagaacttataatgaccataagtatagggcaccccaagattgatggatagtcaaggggctttttctttttcttttcttttttgaaattttttaggagctttttctttattttgaggagtaatctgaatgtgtcgaggtctcggtcaattgcatgaaccaaatagctcttactttataaatgtaatggcgggctatgtagatggtaatacagttgtatgcagaatattttgttcgaggaagcttagcgaagtattttaataagtggaaatcaccttttttgtttttgcagcctgagaattcagaataaactacattagagtttaatggtaattttaagtagataaatatggaagtgtatgcacaaggcaaatgggatattaatttttaggaggatcctctgggagtcgcacttcagtcttgtttctgttatgcttatttactcaagggcattattgccgtatgttacaagaaaacctttttcatattcatgaaatgaaggaaaaaacgtattgctggtggcttggtgcatttacagtcgtctattctcctttttaactgtcgactttttttattagcactgccctttttactttgttatttccctannnnnnnnnnnnnnnnnnnnnnnnnnnnnnnnnnnnnnnnnnnnnnnnnnnnnnnnnnnnnnnnnnnnnnnnnnnnnnnnnnnnnnnnnnnnnnnnnnnnnnnnnnnnnnnnnnnnnnnnnnnnnnnnnnnnnnnnnnnnntccctacagcgttgtgcaactttctttttgcgagagttaagaagctgaacttcatactgttctggtttctgatggagttgttacactgatctattaccagattcgaacactaggaatgctgagatcacgatttcactctttgcctggagccttcaatacatatttggtgccatcagacaaaggcagaaacagacgttttacactctcaaagcgctttgcagaggtaccaaatgacaatgacgaaaattattgtcaagacttcactcataacccccctgaaaagtcatgatatgctgaagaatttaaagtacaggtttcccccaacaagagaactgaagctgccaagtttgctcaactgtggaatgaagtgatttgcagtttccgcgacgaagattttataagtgataagtgaggcccttagatcatgttcacctagaaaacattatcattgcaatgcagataatggaccttctgttatgcagggagatggacctactggtggttccatactcgtcagacccgagcctaaaattgatgcagtggccgttgttcttgcttgccagcaaggtttgacagaacaaatttaatatgtccactctaccttgttacatgtttgtgttcggatcactggaaatcattttcattgaaatttgcagatacctatagctttagacatggcagcacaatttagaccgagagacagtgatttgtggaagcgtatatgtgcagacgagtatatgaagtgcgctgtaattgaatgctacgagtcattcaaacttgttcttaatttagtggtggttggagaaaatgaaaaaaggtatcttcttatacttccatttttcacaccgtttcacgtatctctatatgagaaagacattgatgttgtttgtcgtagcttgtaggtattcagttaatgataacactaggaaataaatacttgcagacagtgtgcactatttttcttcaaaaaagtcgttactagtacctagtaggtctgttttgcctgcacagtacctattaggttataatttctatgattttctaaggctcctctgttgacgaattcttgtcacttttgagcaagaccgggccacccaggaaatcatttgtttcgttccaacatgaataaaacattcttaccataaaatgggaaacacgcaggatcagggcaagtatttttgaacatataaagtggtcagacatggctgaatgtttgtagtttgaacatgcaacgttttcattcgtagtaatgatgccaaaaatcaatataaacataatactaaaaaatctagggagaagttcaagattacaaatccattacttttaccaataaatatatctgtctagttgcgtatggctgcacatcatccacttgcaaatttaagaatcaagatattccaaattgaactagggagaaggactgccaagcacctccattgtgcaatatgcatggaagggaaaccatgattagttgtaactgctaaatgtgcaacgtctgttagataggcagccttagtactattgaaggcatatgtgtccttttttttgcggggaaaaggcatttgtgtccatctttcatgttagttggctttttttacagcattgctctttatcagtgcatgctcactgttatcttgatcttctactgacatgtttgttcattaacttcaacaggattattggcattataatcaaagagattgaagctaacatctcaaagaatacattccttgccaattttaggatgagcacattgccagtcctttgcaagaagtttgtggagcttgtatccaccttggtaagcaatgctgttacctctactgaacaccaaccctattgaagattgcattgcttgatatatttttagacaagtaacacgtttgattattgctactattatgtgatcacatctgcagaaagaaagagacgcctcaaaatttgataatgtagtgctgttgcttcaagacatgctggaagtgatcacgagggatatgatggtcaatgagatcaagtaataccttctgcacccattatactcatacatgtgccttgtcatagaaactggttactatatattttttaacatgtgttgtttatagagaactagctgaatttggtcatgggaacaaggatttagttccaagaagacaactttttgcgggcacaggcacaaaacctgcaattgttttcccaccaccaatttctgcgcagtgggaagaacaagtaataacaccatattcttatttggcttttgtaaaaaagaaggttcactaacttcacctatctacagattaagcgcttgtaccttcttttaactgttaaagaatcggcaatggatgtgcctacaaatcttgaagcccgccggagaatatcatttttcactaattcgctattcatggaaatgccacgtgcacctagagtgcgcaaaatgctctctttcaggtttgtctcgtatgtaaactttgcaacatatcgcagtgtcgtctacttttctaaatatactgcagtatcaaaaatcataatgcctagctaaattagctggattcactggagcctggtagctactggctaatggtccttttactgtgcttcttaaaaaagaattatatctgcttgtcaagaaatattttgggctgaattatggtatattattaactctgatcagtttgaaagaaaacatgaataattttgggtgtggaattgtgaatgtgtgctagtcaggaaaggggaaagcaccattaagaccaaggagaagcttatcaatgttgggattttttagctgaaattgttaatgtttgatgaattcgtattgtgaactaaatgacggggtgttcttaacttttacggtcaactgtttaggaatttgtttttgtttcaggttattattttgatcactaccatcctcatcgtcaaaaaaattcttgctgtcatttgatgtgtctaagctaaaaatggaagtatgagtgtcctgatgccataatagtatcaagttgcttttgaaactgtctttgagtctgtcactctcattgtctcagcagatttgcatgccccttttcggtattaactacaaactctctggagttttgagtcttgaccagttaacccaatggcgccatgatcagactagaaccaaagttcatctacagttttgatcagaattcactaaaagttgcattatgttacaactgattctgtactcatcagcttattttcgctagatggcaaacaaaaatttgtaaacagaaacgttgaactttcacaatgtctggcagtggcactctgtaatcttgttacctgtacaagtacatctgtgtccaccttaaaggaaaaatgcacctagatattctaaaaaagaagaacaagtggtgaacttcgaggtggaggcctgtacaacagaatgtgtgccacccatctttaagcgcattcataatcaaatcaacaacgtcaacaccagaaatatattatcagttcagaacaacaaatatctgataaaccgtatgtttaaatttgttctgtgatcataagagtttcagcgaaaaagattgggctctagatgattcatatgacacttgttctttgcagtgtaatgacaccatactacagtgaggaaactgtatattcaagaaacgaccttgatctggagaatgaggatggtgtatcaattatattctacctgcagaagatctttccaggttcatttcctgtttgatgtgttttaattactgcagttctttatgaatttggttgccaggtttttctcttctattcttgataattcttgttatatagatgaatggaataatttcatggaaaggattagttgcaaaagagaagctgaagtctggggaaatgaagaaaatgttcttcaacttcgtcactgggcctctctaagagggcagacactctgtcgaacaggtacttcagtcatacccttcaaccttgtcaaatatgaatcatttagttgattccctatttacatgtttttcatattgtgaatagtgagaggcatgatgtattataggaaagctttgaagcttcaagcattcctagacatggcttctgaatctggtgagcttcttcaacttcaaatttgagcattcctagacatgataagtgactcaactttgtactaaataagtgactcaactttgtactaaannnnnnnnnnnnnnnnnnnnnnnnnnnnnnnnnnnnnnnnnnnnnnnnnnnnnnnnnnnnnnnnnnnnnnnnnnnnnnnnnnnnnnnnnnnnnnnnnnnnnnnnnnnnnnnnnnnnnnnnnnnnctcaactttgtactaaagttagtataaagctgagtcacttattctagaacggagggagtatttagcattcctagacatgttcacaagtataagatgttttggatatttcaatgtggactacatacggactgaaatgagtgaacaaacacagtaaatgcatctgtaaataaagttagaacatcttatatttgtggatggagagggtgccttttataaacaatccctgaatttatattgtagaactaggggagcaatcctcaatatttgcaaaaagggggatcttaggaatatttgagagtgagatgaatagttttttttttcatgaaggtaccatcaagagaagagaactaggtctacatattgtaccatctttttagaagttagacccaatcttatacgacacttggaaggggtcttacacattgaggatgttcttaagacccccnnnnnnnnnnnnnnnnnnnnnnnnnnnnnnnnnnnnnnnnnnnnnnnnnnnnnnnnnnnnnnnnnnnnnnnnnnnnnnnnnnnnnnnnnnnnnnnnnnnnnnnnnnnnnnnnnnnnnnnnnnnnnnnnnnnnnnnnnnnnnnnnnnnnnnnnnnnnnnnnnnnnnccgacacacacccgtgtatagcatactcaaaaaactgggcttacaggggacttatgcgaagtgtccaacatctaccctgctgtgtttgcagagatactagaaggctataaagccattgcagatcccgcagaggaagagaagaaaagccaaagatctctgtcttctcaacttgaagctatagcagatatgaaattcacatatgttgctacgtgccagatctatggaaatcagaaacagtcgggtgatcgacatgcaacagatattctgaacttgatggtgcagtaagtgatctttatctattctagaaactaatatacaacatttggccaagcgcaagatacatcatgtctaccccaatgagcaaaatgttttcttgtataactctttggagattgtgtgtctcggttatgtttatatttagttcacatttaattgataatgagatgttccttgagggaaaattgctgaattgcttgttttatccaaattgttatttcccactgtgcaaagtaattacagtttgaatttggaactacagttatcctggtctccgcgtggcatacattgatgaagttgaggagagggatggtgagaaggtgcaaaaggtcttctactcggtgctagtaaaagctcttgacaatcacgatcaggtaatcattttacgtgaagcgagttnnnnnnnnnnnnnnnnnnnnnnnnnnnnnnnnnnnnnnnnnnnnnnnnnnnnnnnnnnnnnnnnnnnnnnnnnnnnnnnnnnnnnnnnnnnnnnnnnnnnnnnnnnnnnnnnnnnnnnnnnnntttacgtgaagcgagttcaaactttcattttgtttctgatttaaacctcaatactcaatagtgtgtatcaggtaatcatttacgtgaagcgagttcaaactttaattttggttctgatttaaacctcagtactcagtaatgcgttatgtacttctttgtcctgtgaaggaaatataccgcataaaattgccagggacagcgaaattaggtgaagggaaacctgaaaaccaaaatcacgcgatcatttttacgcgcggagaagctttacagaccattgatatgaaccaggtgaacttcatggttatagtgcctttttagtaagtaggttgcattctgtccttttgtaattatcaatgctgtttaggacaattatttggaggaagctttaaaaatgcggaatttgctggaagaattcaatgagaatcatggtattcgtcctccaacaattcttggagtacgtgaacacatattcaccggaaggtgtgttttaagctttgcagtagactttacttagttttctttataaaaattgcaaatcaatgcctaacatctgacattgctggattgtagcgtgtcatctcttgcctggtttatgtcaaaccaggaaaccagctttgtgacaataggacagagggttcttgccaatccattgaagtaagtctgaatatactttgatgtgtcctatttgaattaagcgcaatacatggttatcatatggagcatctatggtgactatctcctggatgagcgcttatgttttttttttatcagaccttgaaatgcacacatatgtttgttggagattagaagtaatacagacataaatactaaaacaaccaagtgctatttcctggaacatttctggcatcaaatcctttgaagctaaacaatgtcatcagcttaaagtgtgcattgtggtctaagtgctgtatatctgacatgctgtttcctgaaactttcctggcatcaagcttttcaaactaaacaatgccgtcaatttaaaggatgtattatggtggaagtgctgtatatctgacatgctgtttcctgtcagtaaagcttttcgagctaaacaatgtcgtgattttagaatgtgtattatgtctaagtgatttatatctgacatgctgtttcctgaaattttcctggcatcagagcttttcaagctaaacaatgttgttaatttaaattgcgtggttcggtcattgctatgtatctcacattctcttttctgggcagagtacgttttcactatggacatcctgatgtgtttgataggatttttcacattacaagaggtggaattagcaaggcttcctgtggtataaacttgagtgaagacatttttgctggtatgtacttttccacctattctagctgttacctgtggattttttagagaaatttctgaatggatggttccctgggatatccacatcctcatatatgtttgacaactgactcacacatgggcctatatgggcctcaaacagattactctaaactcgattaggactgatgctactcttatctaacacattaactcaaattccagcatttccaatttctgccctgggacaacacaaacttaatttttctttttcaggtttcaactcaactctgaggcgaggaaatgtcacccatcacgagtacattcaagttggaaaaggacgggatgttgggttgaatcaaatttcactctttgaggccaaagtggcatgtggcaatggagagcaagtgcttagcagagatatctaccgtttgggccaccgctttgacttcttccgaatgctctcatgttacttcacaactgtgggattttatgtcagctcaatggtacaaaacatctacatgcatcacatttcctttactaaaaaaaagcatgcatcacatttgtcttgatttgccatcgtccatgttttttatgttcttattattgtgcagatggttgtcataatagtatatgttttcctgtatggaaggctttatttagccctaagtggacttgagtttgcaattatgaagcaagcacgaatgagaggtaatcgtgctcttcaggcagccatggggtcccaatctattgtgcagctaggtcttttgatggccttacccatgtttatggagatcggactggaaaggggttttagaagcgccctgggggatttcatcatcatgcagctacagctatgtgcagtattctttaccttttccctcgggacaaaatcacattattttggccgcacaatcctccacggcggtgcaaaatatagagcaactggcagaggctttgttgttcgccatgtgaagtttgctgaaaattatagaatgtatagcaggagtcattttgtgaaaggacttgagctcatgttactacttgtagtgtatgagctctatggtgatgtggctacagattccactgcctatgttctgctgacatcatctatgtggttcttggtaatcacatggctgtttgctccattcctcttcaacccatcaggatttgaatggcaaaaggtggtcgatgattgggatgattggaacaaatggataagcagccgtggcgggattggtgtgccggccaataaggcctgggagtcgtggtgggaagaggagcaggaacatctgctgtctacaggcatagtcggccgcatatgggaaatcatattatctttccgattcttcatgtttcagtatggtatcatgtaccatttgaatatcgctgatggcaacaaaagcatatcagtaagtcatccttaattccttattaaatggatttcatgaaactgattacatgattttgttaattgtttataatcactgtttactgatacaatttagtgactgtcccttccaaacttgattttgtggcttcaggtttatggtctgtcttggctggtcattgtagcagtagtgttggtcctcaaggtaaatttcatttgcttgctgtcgatgaaatcaataagtacatattggttggcgtatgtgtatagtttatgtccttgttatgctgctgatatggtgccatttccttaggtggtgtctatgggaaaaaagaaatttagtgccgacttccagcttatgttccggctcctcaaattgttcttgttcattggatctgttggaactttggcgattcttttcacccttctgcaccttacagttggtgacatattcgccagcttccttgcctttgcacccacaggatgggccatcctgcaggtacatacatcatcagcaccaaagcttcccttttgttttgttttaaggttttactcccggcttatcctgcgcgaggactgaggagtgaggagcagtatcaattcttttttttccaaagggagaaagaaacggagaggatttttatcaagttaaagttgctattatcaaaactgacatctttcacaggctctaatccattcggcatcattgcaacagatatcacaggcaagcaagccagtggtgaaggctttaggactgtggggatctgtgaaggccttatccagggggtacgagtaccttatggggatcgtgatcttcgtgccagtggcggttctggcatggttccctttcgtctccgagttccagacgaggttgttattcaaccaggcattctcccgaggcctccaaatctctcgcattttggctggtgggaagaagcaaaactgaggtgagtctaggaggtggagtttccatcacagtaaggacacacagagtagaaggaggcagaaattagctccaggttcgttgtattagatatgggtgttgttggaggggggcatcacatggctgctaacatgctgacactttcagaagtttcttactcttgtacacacagggcggtttttcttaggcattttccatgtatatctcatgctaatacattcttacctctgttactagattgtatacgttgcttgtatagatagatgtatgcccccacaacagttgcgacaaaacattacagtccttttagaggcaaagatgaaactgatttttgtgcatgaagcaacaaaacagttcggtctttttaggttcagagacccaattgatttttgcgcatgaagatgtttgtgtttgtgctgtacggtgtaccagtcagtttcctgctttatgcttgggttatctgaaactttaaatttggactgatgtttgaacgcgctggcttttctcagctggggcctctgctttctattaaaagcagggccgtgtggccttttcctctaaaaaaaaacacccaattcatattacgctagatctccttttttagaatacaagaatacgctgtattactctggttcggattgttgcggcgtatgatcataacatcagttggacggcgttttgtgctctgtttcattcatagacaaggataataggacagaggttggaattatgccggtaggtacaacttaacagtaggtgaaggctgacatcgagttgagatggaggatctgagcttgttatcattccagctttaagcaagccacctcactaaaatttgaattcacaaatgagctgaagcaacatcgattgcaatcataggagaccggtaactaactacagctttcagcttgtccctgcccgatgtctaatgatcgtccaagcacacagtgccaattaagtacacacgaggtgactgaaatctcacaactattgtcatgataccacaggcagaca

SEQ ID NO: 171 - DNA, 3735 bp, Hordeum vulgare
  misc_difference 1..240: note = a, c, t, g, unknown or other
  misc_difference 2839..3102: note = a, c, t, g, unknown or other
  source 1..3735: mol_type = unassigned DNA
nnnnnnnnnnnnnnnnnnnnnnnnnnnnnnnnnnnnnnnnnnnnnnnnnnnnnnnnnnnnnnnnnnnnnnnnnnnnnnnnnnnnnnnnnnnnnnnnnnnnnnnnnnnnnnnnnnnnnnnnnnnnnnnnnnnnnnnnnnnnnnnnnnnnnnnnnnnnnnnnnnnnnnnnnnnnnnnnnnnnnnnnnnnnnnnnnnnnnnnnnnnnnnnnnnnnnnnnnnnnnnnnnnnnnnnnnnnnnnnntattatcaatgttcaccagaaaaaaaaagcaccttttgctttgctcttgagcaaaaagaaaaaaaatgagagggaaaaacacaccatattgtttctcttttgcagacaagggcaagataaatgttatggaatcgatcacatcttggtaacatatgtggccgttcaagatcaatgtgttgaccacgcccacgatccacgcatgcatttgtattggcggagctaggcaaactatttttagcttttctcttagaaaaaattctatcattagctcgaattttctggaaagacttgtaaggactcccttaaatttctatcggtattcctgatgaactttacacgtggcaacaagcactagagagagtagtcgcaaaagactaaaaatagaagacagaaagattagtggaaaagggtacacatgcgaaccgtgaaagaagttgccgcctccgcttctctccattgacgacgaaaccgagcacctcccagctcgacgaaatcgggtgcccgtcagtgcgatccctctgctgcattggcatggcggagccggaggacggcggcgaggtggcccctcctgaggcggcggcagcgacgaacgcagccgctgattcgtctccccctgttaaggaggagccggcgccagcggcagaggcaaagccggccagctctggcgaaggggtctccctcaactatgaggtccgaaatatctgaaattctttttatgaatgtttgtttcttaatacggtgcttgtcctattttttatattttttttgcgggcgtgcttatcctatataatgctgctatgctgtgaatttggttgacaagaagttgccgtgtttgaagtgttttgtcaaggccaccaaaatgttatgtcaaatttcgcattgtcggcgatgatgatgtcaattcaattaagctgcatttcgactatgattgttcttgcatgaaccaaaatgtaaagatcccaatattggtcgtgcatttttgttttccgaaaaatgttgtttgagaggctttgtgtgggaaatttgttcctttcttggggatgccaagtgctgaagtgtgatttcatttcgattctggttctagttcattgattggtttataagacatggaccttttttgttctttaaatatttggatgagtgaactataacacgatggtgtcaatcaaaatgcttttttattggctgagtgaattgtgaataatcttaatgccagtataggtagcatgatatactgaataatgtgtaatcatacggagaaagggacattttctttgtccatgttatgttcaagaactgatcatatttctattcccatgaaccgtgctattgtatctccactgcaattaaaaaatgaagttcaaacttagcttaacacatgttgaattccaaccgtcatgctttttccggtttattatgtaataaagtttttttttcctttttgcgggtttattacaccaagttcgtttatacatctatctataacaggaagcgagagctctcttgggaaggctggaatttcagaaaggcaatgtagaagctgcactttgtgtgtttgatggaatagaccttcaagctgccattgagcgctttcaaccatcatcctcgaagaaaacaacagaagctactctcgttcttgaagccatttacttgaaagcattgtcccttcagaagctaggaaaatcaacaggtaaaaaaatgctttataccaccatcgtgttttacaaaaataaattaccatgtggaagctgttttgtttttagcttatgtttgaccttgtaacaacttattgaaataccttttgaacatgcagatgccgctcaacaatgcaaaagcgtcatcgattctgttgaaagtatgttcaagaatggcactcctgacatcgaacaaaagctacaagaaactatcaataaatctgtggaacttctcccggaggcctggaaaaaagctggttctcttcaggaaacatttgctgcgtacagacgcgctcttctcagcccgtggaacctcgacgaggaatgcatcacaaggattcaaaagagatttgctgttttcttgttgtatggttgtgtggagggaagcccacccagctccggttcaccagctgaaggcacttttgccccaaagactaacattgaggaagccattctactcctcacaatattattgaagaagtggtatcaaggaaagacccactgggatccctcggtgatggaacatttgacctacgcgttgtcgatttgcagccaaccatctcttattgcaaatcatctcgaggaggttttacctgggatatatccccggacggagagatggaacacactagcattttgctattatgccgttggccagaaagaggtggctctgaatttcttgaggaagtccttgaataagcacgagaacccaaaagatacaatggcattgttgttagctgccaagatatgtagcgaggaccgccgtcttgcttccgagggtgtggagtacgcgagaagagcgactgcaaacactgaatcattagatgttcatctgaagagcaccggcctccatttcttggggagttgcctgagtaagaaggctaagactgtttcatccgatcctnnnnnnnnnnnnnnnnnnnnnnnnnnnnnnnnnnnnnnnnnnnnnnnnnnnnnnnnnnnnnnnnnnnnnnnnnnnnnnnnnnnnnnnnnnnnnnnnnnnnnnnnnnnnnnnnnnnnnnnnnnnnnnnnnnnnnnnnnnnnnnnnnnnnnnnnnnnnnnnnnnnnnnnnnnnnnnnnnnnnnnnnnnnnnnnnnnnnnnnnnnnnnnnnnnnnnnnnnnnnnnnnnnnnnnnnnnnnnnnnnnnnnnnnnnnnnnnnnnnnnnnngttcaaaaaaatgaaatcgctttgtaacagacgagtttccgtatgaaactctaatacttcgaaagagattgttcgttttgtacacgcagtgcatccagtttttgtcgtaaccctctcaactttcttgcatatgttatgtggatgaaatgatgataccatgccaacttggaaccttttcagagttcatttcaaatgcttttcaatttcatggtcaacgtgcagttgagcattgcgcttctcccttcatcgtctctacactcagggcttataaacaaaaattatcataaaagtaatatataagaattatcataaaattatatagaattttgttacaaactttaatagaaaaaaaattatcataaaagaaaataaataagtaattagaattttgttcaaaacattaaaagcaaaaagaattatcataaaagaaaataaataagtaattataattttgttacaaactttaatagcaaaaagaattatcgtaaaagaaaataaataattaattagaaacaaaaaaaagcaaaaaaactgggaaaaaaataaaataaacggatcaactaaaaatcttttataaacctctagtattattgaaactaaaattatatagaattttgttacaaatttaatagc

SEQ ID NO: 172 - DNA, 6520 bp, synthetic construct
  misc_feature 1..6520: note = Description of Artificial Sequence: Synthetic polynucleotide
  source 1..6520: mol_type = other DNA
aaaaatactactgctagcttaaaaagtttcagaaatgctggagatttatcggtcaaactgtcgctgaggcggcaccggcctcaccggatcgaaagcaccccgctcgaactgaccggaaacgcaagcggctagcgagatcgcgggatgcatcctgcagaggtggaggaccgagcggagcgtcgcggggggaggggggcagggggggtggcttaccgtggtgaggatgacctcgagcttgcggtagcggaggccgtggccggagaagaggacggggttggtggcggcggcgccgaggccgtggcggcggaggagggcggcgcgggcggcggccatggtggagtagggttcaggggaaggaggcgacgggggccggcggctgccaccaacgggtgcgcgagtgagagtattggtggctcggcttcccgccggaccgggccggtgccaggccaggcccgctaagggatctccattttttcctttgattttatttttaaaatccttctgctgcccaaaagaatttgcattttgcactttcttgagccctctttgattttattttttaaatacttccgctgccatgaaaactttgcagtttccacttttttggatgaggaagtcgaccagagcggaaatctggaaaagagccagggttcttctgctggatgccaacaccctctgcaatccaataaaatcaaatcaaacattcaaaatctcatcagaatatcaactttatgtttttttcttaaggcacataaatgcatttttttgtaacataaaaggttatgtgagtttttagtccaatttgtttcgtagttggcaggttgaaactctaggactcggatatgtgctatactcaagcaccacatgttacattttattttgcgctgaaaatcaagacatgcatcattaactttcatatttcatgaaagttacaatagttagaccctctccatttcaatttccaaagatgtaggatgcaacaattccttttaccaccaagacatattaatattgtgtggtttccgtgatatgaactcccctatcccttggtggctatggtaaatctcccctccaggcttcatcaatgagaccgtggattcgcctcccctctacctgccgctccgacgactggtggcggggttagggatcccggtgctttcggtctggttaatagtttaggttaggtttttttagtcttcttaggtgtggcgctcagatggatggcagcgctttttctcgagtttgtgtttcggtctccgattctcctcaagttcgttcatctgaacgtaattgaaggacctccgacgtagatttctgtcgtctccttgctacgatgagtttagtgtttctcgtcgtgtgacgagatttgttgtcaggtgcttcagatctattgaagggttcaacggtgacgactacgactctagggcactagtccttacgggcacatgcatgaagacttcccgactgtcatcgtatggtcaagccggctacagtaggggaacaacggtagtggtcattcgatggtgaagaggcgttctttgtgggcaagccaaatgattctgatctattatcaatgttcaccagaaaaaacaaagcaccttgttgtttcaattttgcgaaaaatgattcaaatctattatcaatgttcaccagcaaaaaagaaaaataaagcaccttttgctttgctcttgagcaaaaattcttttgagtggaaaaaatacaccctgttgtttctctttgcagccaaggacaaagcataggttacgatcacatcttggtcaacatatgtggccgttcaagatcatccatgcatgcatttgtattggtggagctagacaatctatttttagcttgtcttagaaaaaaatctatcattagctcgaattttctggaaaaaattgtaaggactcccttaaatttctatcggtattcctgatgaactttccacgtggcaacaagcagtagagagagtagtcgcaaaagagtaaaaatagaagacagaaaaattagtggaaaagggtacgcatgcgaaccgtggaagaagttgccgcctccgctcctctccatcgacgacgaaaccgagcacctcccagctcgacgagatcgggtgcccgtcggtgcgatccctctgctgcagcggcatggcggagccggaggacggcggcgaggtcgcccctcctgaggcagcagcggcggcgacgagcgcggccgcccattcgtctccccctgctaaggaggagccggcggcagcggcagaggcaaagccggccagctccggcgaggcggtctccctcaactacgaggtccgaaatatctgaaactcttttatgaatgtttgtttgatacgtagtacggtgcttgtcctatataatgctgctatgatgtgaacttggtttgcaagaaattgccatgtttgaagtgtttggtcagtgccgccaatgttatgtcaaatttcgtattgccggcgatgatggtgtcaattcaattaagcgatgactttgattgttctcacataaaccgaaaatgtaaagatgccaacgttggtcgtgcgtttttttcaaaaaatattgtttgagaggctttgtgtgggaaatgtgttcctttcttggggatgtcaaatgctgaattgtgattccatttcagttctggttctatttcattgattggtttatccaattgcgaattattcggcaagtttataagacatgcacctttttttgttctttatatatttgggtgagtgaattataacacgatggtgtcaatcaaaatgctttttattgggtgagtgaattgtgaataatcttaatgccagtataggtagcaagattttactgaatgatgtgtaatcatacggagaaagggacattttctttgtccagattatgaagaactgatcatatttctattcccatgaaccatgctattgatctccattgcaattattaatttccaaaaatgaagttcaaacttagcttaatacatggagaattccaaccgtcatgctttctcgggtttattacaccaagttatttttttgcgggtttattacaccaagttcgtttatacatctatcggtaacaggaagcgagagctctcttaggaaggctggaatttcagaaaggcaatgtagaagatgcactttgtgtgtttgatggaatagaccttcaagctgccattgagcgcttccagccatcatcctcgaagaaaacaacagaagctactcttgttctcgaagccatttacttgaaagcattgtcccttcagaagctaggaaaatcaataggtaacaaaattgctttataccgttgtttaagtttaaaacaaattgctttaattgtgttttacaaaaataaattatcatttggaagttgttcttttttttagcttattctttgacttgtaacaaattactgaaatacctgttgaacatgcagaggccgctaaacaatgcaaaagcgtcatcgattctgttgaaagtatgttcaagaatggcactcctgacatcgaacagaagctacaagaaactatcaataaatctgtggaacttctcccagaggcctggaaaaaagctggctctcttcaggaaacatttgcttcgtacagacgcgctcttctcagcccgtggaacctcgacgaggaatgcattgcaaggattcaaaagagatttgctgctttcttgttgtatggttgtgtggagtggagtccgcccagctctggttcaccagctgaaggcacttttgttcccaagacaaatattgaggaagccattctactcctcacaacagtattgaagaagttttatcagggaaagacccactgggatccctcggtgatggaacacttgacctacgcattgtcgatttgcagccggccttctcttattgcagatcatctggaggaggttctacctgggatatatcctcggacggagagatggaacacactagcattttgctactatggtgttgctcagaaagaagtcgctctaaatttcctgaggaagtccttgaataagcatgagaacccaaaagatacaatggcattgctgttagccgccaagatatgtagcgaggactgccgtcttgcctccgagggtgtcgagtacgcaagaagagcgattgcaaacacggaatcattagatgttcatctgaagagcactggcctccatttcttggggagttgcctgagtaagaaggccaagattgtttcatccgatcaccaaagagctatgttgcacgcagaaactatgaagtcccttacggagtcgatgtctcttgaccgctacaacccaaacctaatattcgacatgggagttcaatacgctgagcagcggaacatgaacgccgcgctgagatgtgccaaagagtttgtcgacgcgaccggtggagcggtctcgaaaggttggaggtttctagccctagtcctctccgcacagcaaagatactccgaagcagaagtggcgaccaatgccgcgttagacgagaccgcaaagtgggatcaagggtcactgctcaggataaaggctaagctgaaggtcgctcaatcgtcgcccatggaggcggtggaggcataccgggtcctccttgctcttgttcaggcccagaagaattcgcctaaaaaagtggaggtttgttttcttaatcaaatgcagcaaaaaaaaagtaccatccgtatactatttttctcttggcactttctccattagttcacataccgatgcttcagggagaggctggtggagtaaccgagttcgaaatctggcaaggtcttgcaaatctgtactccggcctctcacacaccagggacgccgaggtatgtttgcagaaagccacagccctgaaatcgtactccgccgcgacactcgaagccgaaggtgagccgaaagctcaggtcaccaaacccttacaaaatttcaccccgatcgatgtacgagtcgatgcaatgcaatgcaggttacatgcacgaggtgcgcaaggagagcaaggaggcgatggcggcctacgtgaacgcctcggcgacggagctggatcacgtgtcgtccaaggtggccatcggggctctgctctccaagcaggggggcaagtacctcccggcggcgagggccttcctctcggacgccctgagggtcgagccgacgaaccggatggcgtggctcaacctggggaaggtgcacaagctcgacgggaggatttccgacgccgccgactgcttccaggcggcggtgatgctcgaggagtcggatcccgtggagagttttaggacgctctcatgagattatcacaacatacaggaactccttactttttctaccctccacattactcctctactctccttgtttctctctcttgttgtagttcaatgcatgtaaagttaaccgatgtgtataggcacaattgttttgcatatttatttattttgccgtgggacctgtatttgctcatggaaagtgtgatgctttcagaaaatgcaagtgtgatggcagctgaactgttacttgaatttcgcttttacttgcactgttttaattttgtatgagaatgatgacgccaaagccttgagttaacagcgctatttaatttacacttcacactgcacactctctatactattgatagcctgggcttattttttgttgccctctatacattctgcatagccatttttttctcttttttttgcgagggtaaagagttttgatagtaattgtggacttatcaggaagctgaacatatatagcaaatgtattgtaaagatggacctgccctatgctgttcttcatcttggcggaggaccggcggtggggagtggtttcggggaggccggggcggcaaggcggcacgggagcgctgccggctgcgggcggcggaggccggcggtttggccagtggtggctggcggcttaagggggtgaaggttgaagaagcactgtaggcctttgatttcacatccaatggctcagaaatcgactgaccacaaatgaaaattttagctgactgatttctagccatttccgtcaacaacacctgggttctgattagtttcttcaggaaagctagaatcagctactgccttcaagaaacaaaaatggtcgacggagggggacaggccagaaccatagaaccattcgtgttatcacccctgatcactgcagttgtgatgcttcgggcgggaacaagaatggacggaggaggacaagctggagatggaggccgagctacaagcagccgggcatcaaacaactaaatttctcaacctaaatggccctgtgcccctgtcctagtgtcgaatttgaatagaatgatgcaatcaattcttctgtaccgctcaaaagagtgataggatacatagttgcatcgcatgctgggacacagatcctctggctaaccctgccttaccctgcctttgggtcgctgacaagtgggccccacgcttggtgggacccatgtgtcagtgtctcaatggcaggttagccaaagtcaggggatcctcgtcccacatgctgatcaccaaagga

SEQ ID NO: 173 - DNA, 30000 bp, synthetic construct
  misc_feature 1..30000: note = Description of Artificial Sequence: Syntheticpolynucleotide
  source 1..30000: mol_type = other DNA
ggatggcctatgctgtgtttgaaactgtatgggcattggctccacttctgctgcttctgaacttgctgctgctacatgcacatctggtgcactgaacatcactccttcttcatctatctgatacagtttgggctctccaatttcttctagagggatttgctgctcaataacattggagctggtgtttatacttgcagcattgggagaactggccctaacaactgtcacattcaatatcttctgattttgcaatgctatgttgtctagaatttcctcaagcttgtcatcatcatctatttcttccattccttctatccctagcccaggatccctgacatagtacatgtaatctttaaatccataaccttctgtttctatcaatgctactaggttgtaaaatgttatgtctgacaccatcatagatctctcaatgttgtctctgtcatggaaatgcatcctcaattcccaaacctcatcatccagactgcaaataatataaagcactaatgaaacactaataaaactaataaccaaatggaaaccctagggcacaggacaaacaaagcacaacatcagaactaatcaaaaatgtcaaccctaggcacaggacaaacaaatcacataatctgaactaatctaaataatgtcctagggcacatgacaacaaaatcacaacatttgacacttgtactgcatctgataggatagaacaatatgaacactaaccctaggagtaccctggcaacgcaattgaatggagaatgggaagggaagagcaaagaaaagtggatctcactatacgccgccgaaggatgccgcgatgtgctggcttcccgtcggattggccttcaccgccgcggcgaatgctctggccgcatttattccatcgaatactgcgggtcctcctcctcctcttcctccgacggcttgctagggttcgagctcgcgcacagctcgcctagatccactgcgggtcctcctccactacgtacgatgcgtgcggcgctgccgggcggagagccgccaccagcatctccacctttcgccggactgcgcatctctgtgtttctatggaatggcgacggcaccaatgggggagggcgacggcagcgggagcgaggaggagggggaagaagaatgggggagggcgacggcagcgggagctaggaggagggggaagaagaatgggggagggcgacggcgacgggagcgaggagggggaaaagagacgaatgcgggagtggatgactaaagacgagcccgaacggcgccgtctaacggctgccgggacggcctggagtgccacgtacgcgaaaaacgggccccacctgtcataaactcacttaactcagcccgatccgccgatcagtggtttttgcaaaacaattacgcaagacgtggtgctttctgcagagaatctgtatcctagtgtttttcgcaaaccgagccctcaaagtggtggttttatgcaatttactccctgccacaagacaataatcctttctcccctctttctcaatgatttccaacccgcaccccaccaactcacacgggatactaccatctcactgacacagggcctcgatgggcagcaaaggagaattagtggagtccgtaattcttcctccacacaaatacgtactctacctgtagtgttaaaagctgtgggacatatacgtcagtctaactttgactgtcaggtaaggtgcttggaaggtgataaagggtagttttggggtccaacggcccgccactacgctcggcccactgcccagagagagaaacgtgttctcggggaggcggggagagagggagctagcatttccaccgccttcaccctccgatcgcgccagcgtgtcccccctcgccctagggaaggcaggctgggccgtcggatccgggtataagtagcgacgcgcacgcgggccgtgcctattcctgtacttgccgccccgaccacctcccccgtttggttccaccattccattccagcgcaggacggcgggacgcgcgaggcggaggcggaaggaagcggagcgcgctcgcgctagggttcgtccgctccctctccccctctctgttccggccgaatcgaccgaccctagctggctagcgctgacccgctgcgccgaatgcaggcggaagcccccgagatcgcgaggtggtggaggcggagatgacggcgccgcgcggtggcggggatgtgccatcgtcgacggcgtcggcagccgccgccgccgcttcgatgaccgagcccaacacgccgacgtcggcgcacgcgtcggggctcaaccggcgggggtcgaggggcgccgccatggcctccttctccatggaggtcttcgacaacgaggtggtgccgtcctcgctcagcagcatcgcccccatcctgcgcgtcgccgccgagatcgagcacgagcgcccccgcgtcgcctacctctgtaagttcgttgcacttcgaagccgtctccgcgcccgcgcgtgcctgttttgggagattttcgacgccttttcctggcacagctcggcgcatttggtgtctcggtcggacgaaacgggcaactcgtgatgatatgtttggcgattcacagccgttgtagtgtttatttgggaaggttttgtgctcacgaatctcggaaaatacatgccgcgtgcgtcggttgttgttgtttttgtttctgggctgctttgattgttacgagtttattaaggggcatgtctgagatttctccgcgtatgttggttttgctgcgttagctggatcttcggctttgatatgtttctccttactcgtgaagctgatcttagaagtagctagcttctctcctgtatgctgcaccatgaggtgttcgtattcctatatgatcgtatcgacgagatggcttgtgtttgagagcgcagattagatttagttgatgcaacttccagattccaacgttctccctcgattgtgttgcttttgcttgaatttggtatctatttaatacttgctggttatgtttgaatcattaatttaggctaggatagtgctgcgcgatcagtttgcttggaaagttggaataccatatatcaggtagctcgtgtaggttcttcggtgtctctatgtgagatttctccgcctatgtcgatctagctgtacatgctgcgctagattttggatttagtgtgttttctccttttttcagtagctaattttgtcgcaggttagcttctgtatgcttgcattattcgtaccaaaccaaatcactactgtttttcgaagtgcagagccgcagatttgattcattttatggcttttccgacagttctccctagctcgttttgattgaatatgggcgctctctgtgttgtttgaatcatgtcagatatgacagttttgctccaccagcttttctctgaagaagtgcatatcacgtagcatgaatgggtgcttctggttcgcccttttttcgggatctcacgttgatctgttactctgtgaactaggtcggttctatgccttcgagaaggcgcacaggctggatcaaaactctgttggtcgtggcgtccggcagttcaaaacgtccctgcttcagcgcttagagaaggtgtgagacatctttctgtctcttcccctccataatttctgcatgatctagctgacttggcgtacatgagggtttgttttgttagttgatacatgtcgacttgatcatgttccctcgctggttttgactgggtcactgtatctggccttcatagatatattatgcaagttgttgaattattattactaccatcttagctttttaactgcttgcaggatatatataggtaatatagagtatgagtttgtttggctaataagcctcatggagttaaaaataagctggaagctaatatggacgactctaccttaatttagttgtcaaaatgtagtagtggtgcaagttatgttgtccaaatgctcagataaaccaaagggaaataggcaacatatgcacatgcagtttaagccatgaaagtatttcctacttttcatttttgtgttgtaatatatatcttgcagatacacgatttttaacttcaagagtatggtcgctggactttagttcagtacacatttgtttcatgataagcttaccaactccatctccaaatacatgacgtagaaagcatgtagtcaaacttctctacgtttgaccattaatcaaatcaaattatttagtttttttggatagaaattataccattgattcagaacagtttcactatatatctttttacttatatatgttgttcattgaagactcaaaatgcaaaacattatctatcttagaacggtgggagtatatttgattattagtgataagttgataactgtcgataatcaatctggaaattttattgtgattatcctatttgatgaccatattgggagttgtgatcagccaagcaaacctgcaagctcacttaatcctacctaacagataaagaacactgttctagtaatagaatggtgtgcttcgttttattgtgattatcttaatttttaaccatattgggagttgtgatcagccaagcaaacctacaagctcacttgatcctgcctgatagataaagaacattgttccagtaatagaatgttgtgcttcgttctacttattttgtttcaaagtcacaactaaaccttcagttcagattcaacatttatttcgtgtttctgctggggagggggatgaggtaaaatgacttcagattacaccatcctcctcatgattcgtctcaattgatcagtttgcaatggcagattcttgtttgttagagatataatgaggtagccacattctcatctgagcttattttttcagatgatccagttcaaatttaccacttttttgtttcctacttgaaatggccagcgaatgtagtagaatggggaaaaggagcagggacttagggttcccttgttttcttaaatcggattttgcctaacctactcttgaatccaaagatcctgccttaaaatttcccatttcgatcccacgcaatccaacaggataatagcccgagtctcgcaaagcgattgaagaaaactgatgcccgcgaaattgagagtttctatcaagaatactatgagaactatgtccgcaccctcgacaaaggggaacaagccgacaggtaattcccaatccctaacctatactgcgatctcccctataagtccaatccctcgctatcacgaatccggtcccatgacattgtcgcctccaggactcaacttgggaaggcctaccaaacggctggagtcctcttcgaggtgctctgtgccgtcaacaagaatgagaaggttgagcaagttaaccccgaggtttgtgctcactccagccaactgtcgtcgttctttctcagtagaaatctaggttccctctaatgcatcaagtttttccaaatttcctctgcacagattatgcgctggcacactgaggtgcaagaaaagaaagacatctacgcgccgttcaatattctgcctctcgatgcggccagtgcatcccagtccatcatgcagctggaggaggtatacgacttacaacaatgcagcctatttcctcaaaacaggaacaattgcattatgtactggttcaattaaagaaactgacgtggtcatcgaatgcatcattaacagataaaagcagcagtcgcagctctgcggtacacacggggtttgacctggccttctgcatttgagccggaaaggcagaaggggggtgagctcgatttgctcgattggttgagagctatgtttggctttcaggtctgctacccactccaggcaaaccaatttcgattggtccattgtattactataagctaacactagcttatcttcttgtgtgcagcgggacagtgtcaggaatcaacgggagcatttgattcttctcctcgctaatgtgcacattagacttgagccaaagcctgaaccacttagcaaggcacactcttctatcaatatttactttgacagcttgactttatgaatatcaattgataagcataagatcaatgggttttgcatgcataaaaatgtggtggtagcttctgacagaacaggatatttgcctgagtttctaatattttaaaaaaataaagttatttttcattggattagtaaccaattatttaccttcaacgttatgttgtgattgttggtgtaacttgccataacatacacatgcagtttaatttctttcttgatactactattttttatttccatattcttgacattagaatttgctggactggtgccactacttgcaaaaatgccagctgacttattggctttccaccacgaattcgattgattgaactttctgtatgcattattctgaagcaagtgcgtagctaaataatgttaattacaccctccatttcccatgctttgcttctctcctttttgttcatcgttgcttgatgattgatctcatccgttctttcacccctgaaacagctagatgaccgagctgttgatgtagtgatgaacaagttgttcaacaactacaagaagtggtgcaaatttttgtcacggaaacatagtttgaggtatataattccttaatcagtttcctctttatgtacattattgtgctgataatcttgcaactgcagaaatcctccaggtgctcaattacaggaagttcagcaacgcagaattttgtacctaggtctttatcttcttatctggggcgaatcagcaaatatccggtttatgccagagtgtctttgctacatttttcacaatgtaatttgcacattcttattatcatatcaagtaccaaatctcattgcaaaaatatatctttgaatgattcttctcaatgtgttcagatggcatatgagttgcatgggttgcttgctggaaatgttagtattgtgactggtgaaaatatcaggccatcttatggtggggatgaggaggctttcttaaagaaagtggtcacacctatctatcgtgtcatcagaaaggtactttgataaattaccattacctgaaattccaagttagtttgttctaaatataattgtggtggtttttcaggaggcaggaaaaagccaacatggaaaaactgcacattcagcatggtgtaattatgatgatctaaatgagtacttctggtctgtttacagccctattttctggtcacatgctgacagccttttcacactttctctgatagatcctactctgtttcaggacacctgattgtttctcactgggatggccaatgcgagacgacggtgacttcttcaaatccgtgcacgattcaaggcctgtagcagtggtacagttcgatataagtctgtcagtatctcttccaaagactttgattaggaggagaatactgacaaataactatttgtaggctggaagctcctcaccaaagggttctagtaaaggcacaggcaagacaaattttgtagagacaagatcgttttggcacatctttcgtagttttgaccgaatgtggaccttctatttgttggctctacaggtactgtgccaaaattttcgattggcttttttctctgtactatggtttttgatggtttgacactctgtgaatcttataatttttaaaccgaacaggcaatgttgatttttgcttggagtgaatattcagtgactcaaatccttcagaaggacctcttatattctctatcaagcatatttgtcacagcagcatttttacagttcctccaaagtatgtttcccatttcaaatacttgttttatgtacaaggcatttttctgatgcatgtaatatttccttttattttttgagaacctgaaatttttagtatgacaagtgatgaatattggcataatttagttccctttatgtatgtaataccttctgcttttgtcaatggcattacggtaagactatgttaagctaggttcccgcgatacagagcactttcacagcagaaagcaactggcaagaacattcatgtagatatctgcaactttaggatctcttctcatatgcattaaactagtgttactataccgagcagtcatgttcttgagatgctctctggtctggaattcttgtggttttaagagggttctggtgcaataacaaattcgtcatccaactgaaactgatattttctttaattttgatggcaggtattttagactttattctgaactttcctggccacattagatgcaagttcattgacgtcgtgagaaatattctgaagatagtagttagtgccgcgtgggctgtgattcttcccattttctatatcagaagtcaaacaaaagtcaatttaccactgaaaaatctggacagatggtttggttatgtgaaaggagtgccacaactatatatcctggctgtggcggtgtacctgatacctaatatgattagtgcaacgctcttcctgtttccgatgtttcgaaggtggatagagagctcggattggcatattgttagactgctactgtggtggtctcaggtattgaattcaatctattttatttgtttatgttctattatgtggaaaattacttatgcagcttatcctcattgtaaatattcatttcaaaatttctgctatgaggcaatttttaataaggtaatatttgataaaatggaactgtattttgtagaatgaatttgtcttgatatccttgccagcttattgtttgtcatagtatcctagagggttgagaaactactgataaaattgtaaactgtaacttgcaaaaagagaaaataatccaatgacttctgatgccagggcagagattatcctgctattttgtcattagtttgaaaaaaacattttatggttagttaaaaagttctcacatgcttgtgaaaattgatagttttcacttctctaacaatatgtgttcaactgaacacatttgctatcccagtaatgaaaatgatattgcaagggtacatatgcacgaaacagggtggaaaacgtgaaggcaatagattattttgtatgcaatgcgtggaagtaaaataactggatgaatttccctggatcataaggcgctgtacatttattcgtttttcatatttctttcttgtgcggcttgctacactacactacactaatggcaatgcccattttccttgttcttgctgtacacgctaattgtataaataactgcagaaacgaatttatgttggccgtggaatgcatgaaagtcaagctgctcttctgaagtaagttactctgttctatttttcttctgttagagctttattctgcagaaaacactcaattctcttctattcaactgagaaggtacacattattttggattttgctgctatgcgcgaagctttccttcagttactttgtccaggtaagttctatgcttagttatttgcaaacatgctttgacgagattaatctgaaacagtttaatttgcagatacaacctcttataaggcctaccaaggatataatgagtgttcataacattcgttatgagtggcatgagttttttccaaacggtaattccaatgctttttttttttgtgccgccttcattctggaaccctttttttactgatacttcgttgccttttcagcatcatataatatcgctgctatcctatccctctgggcccctgttctgttggtatgcacttatccagcctgctagtgtagtgcctatccagcttatgtattagctgaaaagtagcttcatttattcccgtttgtttcaaaactgcattctaaatcttggtttatcaactacaatgcttttattcttgtaggtctatttgatggatacacagatatggtatgccattttctctacaatatccggcggtatgtctggggcacttggacgacttggggaggtaatgataaatctgaactattctctgtaatctgttgttttgctttataatttagaacttataatgaccataagtgtagggcaccccaagattgatggatagctaaggggctttttctttatattgaggagtaaactgaacgtgtcgaggtctcagtcaattgcatgaaacaaatagctcgtactttataaacataacggcgggctatgtagatggtaatacagttttatgcagaatattttgtttgaggaagcttagcgaggtattttaataagtgaaaatcaccttttttgtttttgcagcctgagaattcagaataaactacattagattataatggtaattttaagtagataaatatggaagtgtattcacaaggcaaatgggatattcatttttaggaggatcctctgggagtcgcacttcagtcttgtttctgttatgctgccgtatttacaagaaaacctttttcatattcatgaaatgaagcaaaaaatgtattgctggtggcttggtgtatttatagtcggatattctcctttttaaccgtcgacatttttgtattagcactgccttttttactttgttattgccgtacagcgttgtgtaactttttctttttgcaagagttaagaagctgaacttcatactgttctggtttctgatggagttactacactcttgtaccagattcgaacactaggaatgctgagatcacgatttcactctttgcctggagccttcaatacatatttggtgccatcagacaaaggcagaaacagacgtttttcactctcaaagcgcttcgcagaggtaccaaatgacaataacgaaaattattgtcaagatttctcttataaccccccttaaaagttatgatataatgaagaatttaaagtacaggtttcccccaacaagagaactgaagctgccaagtttgctcaactgtggaatgaagtgatttgcagtttccgcgacgaagattttataagtgataagtgaggcccttagatcatgttcacctagaaaacattatcattgcaatgtagataatggaccttctgttatgcagggagatggacctattggtggttccatactcatcagacccgagcctaaaattgatgcagtggccgttgttcttgcttgctagcaaggtttggcagaacaaatttaatatgtccactctaccttgttacatgtttgtgttcggctcttactggaaatcattttgattgaaatttgcagatacctatagctttagacatggcagcacaatttagaccgagagacagtgatttgtggaagcgtatatgtgctgacgagtatatgaagtgcgctgtaattgaatgctacgagtcattcaaacttgttcttaatttagtggtggttggagaaaatgaaaagaggtatcttcttatacttccattttccactgtttcacgtatctctatgtgagaaagacattgatgttgtttgtcatagcttttaggtattcagttaatgataacactaggaaatactccctccgtcccaaaattcttgtcttagatttgtctagatacggatgtatctaacactaaaatgtaactagatacatccgtatttagacaaatctaagacacgaattttgggatggagggagtatatacttacatccggaatagacattgtgcactatttttcttcaaaaaaatcgttactagtactccctccgttcggaattacttgtcgcggaaatggatgtatttagacgtattttagttctagatacatccatttccgagacaagtaattccgaacggagggagtacctagtaggtttctatgattgtctaaggctcctctgttgacgaatccttgccacttttgagcaagacagggccacccaggaaatcatttgtttcgttccaatatgataaaatcattcttaccataaactgggaaacacgcaggtcagcacaagtatttttgaacatataaagtggtcagacatggctgaatatttgtagtttgaacatgcacgttttcattcgtagtagttgatgcaaaagatcaatacaaatatattactaaaaatctacaaccctatatgataatggggtttgagagttcaagattacaaatacattacttttaccaataaatatatatctggctagttgcgtatggcggcacatcatcactttcaaacttaagaatcaagatattccaaattgaactagggaggaggactgccaagcacctccattgtgcaatatgcatggaagggaaaccatgattagttgtaactgctaaatgtgcaacatgtgttagataggcagccttagtactattgaaggcatctgtgtccatctttcatgttttttttactgcattgttctttatcattgcatgctcactgttatcttgatcttctactgacatgtttgttcactaacttcaacaggattattgggattataatcaaagagattgaagctaacatcgcaaagaatacattccttgccaattttaggatgagcgcattgccagtcctttgcaagaagtttgtggagcttgtatccaccttggtaagcaatgttgttacctctactgaacaccaaccctattgaagattgcattgcttgatatttttttagacaagtaacacgttcgattattgctacgattatgtgatcacatctgcagaaagaaagagacgcctcaaaatttgataatgtagtgctattgcttcaagacatgctggaagtgatcacgagggatatgatggtcaatgagatcaagtaataccttttgcacaaattataatcatacatgtgccttgtcatagaaactggtgactattttttttaacatgtgttgtttacagagaactagctgaatttggtcatgggaacaaggatttagttccaagaagacaactttttgcgggcacaggcacaaaacctgcaattgttttcccaccaccaatttctgcgcagtgggaagaacaagtaataacatcacattcttatttggcttttgtaacaaagaaggttcactaacttcacctatctacagattaagcgcttgtaccttcttttgactgttaaagaatcagcaatggatgtgcctacaaatcttgaagcccgccggagaatatcatttttcactaattcgctattcatggagatgccacgtgcgcctagagtgcgcaaaatgctctctttcaggtttgtctcgtatgtaaactttcaacatatcacagtgttgtccagtccacttttctaaatacaccgcagtatcgaaaatcataatgtctagctaaattagctggattcattggagcctggcagctactggctaatggtccttttactgtgcttcttaaaaagaattatatctgcttgtcaagatatattttgggctgaattatggtatgttcttaactctgatcagtttgaaagaacagaaaacatgaatatttttgggcgtggaattgtgaatttgtgctagtcaggaaagaggaaagcaccattaagaccaaggagaagcttatcaatgttgggattttaactgatttttttgctgtttgatgaactcgtattctgaactaaatggcggggtggtttctaattttcacggtcagttgtttaggatttttttattacaggttattttgatcactgccatcctcatcgtagtcttaaaaaacttcttgctgtcatttgatgtgttgtttaagctaaaaatggaagtatgagtgtcctgatgccattatgtggtattgagttgcttttgaaactgtctttgagtctgccactctcattgtctcagcagatttgcatgccccttctcggtattaactacagagtcggagttttgtgtcttgaccagttaacccaatggcgccatgatcatactagaaccgaagttcatctacagttttgatcagaattcatttaaagttgcattatattacaactgattctgtactcatcagctcatgttcgcttgatggtaaacaaaatttataaacagaagtgttgaacatccacaatgtctggcagtggcactctgtaatcttgttacttgtacaagtacatatgtttccaccttaaaggaaaaatgcacctagatattctaaaaaaataacaagtggtgaacttccaggtggagacctgtacaacagaatgtgtgcgacccatctttaagtgcattcataatcacaaatcaacaacgttaacaccagaaatatattatcagttcacaacaacaaatatctgataaaccgtatggttaaatttgttctgtgatcataagagtttcagcgaaaaagattgggctctagatgattcatatgacacttgttcttcacagtgtaatgacaccatactacagtgaggaaactgtatattcaagaaacgaccttgatctggagaatgaggatggtgtatcaattatattctacctgcagaagatctttccaggttcctttcctatttgatgtgtttaatgcctacagttctttatgaatttgattgccagctttttgtcttctattcttgataatttttgttatatagatgaatgggataatttcatggaaaggattgattgcaaaaaagaaactgaagtttggggaaatgaagaaaatgttcttcaacttcgtcattgggcctctcttagagggcagacactctgtcgaacaggtacttcggccataccctttaaccttgtcaaatatggatcatttagctgattccgtgtttacatgtttttcttattgtgaatagtgagaggcatgatgtattacaggaaagctttgaagcttcaagcattcctagacatggcttctgaatctggtgagcttcttcaacttccaattcgagcattcctagacatgatgcatttagcattcctagacatgttcacaaatataagatgttttggatatttcaatatggactacatgtggactgaaatgagtgaacaaacacagtaagcttctattaataaagttagaacatcttatatttgtgaacggagagggtaccttttacaaatacttcctgattttatattgtagaactaggggagcatccgcaataggtgcaaaaagggggagtttttttcatgagaagagaactaggtctacatattatagcatctttttagaagttagacccaatcttattggacacttggaaggggtctatgcactgaggatgttctagaaggctataggggacttatacaaagtgtccaacatcaccctcttttgtttgcagagatactagaaggctataaagccattgcagatcccgcagaggaagagaagaaaagccaaagatctctgtcttctcagcttgaagctatagcagacatgaaattcacatatgttgctacgtgccagatctatggaaatcagaaacagtcgggtgatcgacatgcaacagatatactgaacttgatggtgcagtaagtgatctcgatgatctattctagaaattaatatacaacatttggccaagtgcgatacatcatgtctaccacaatgagcaaaatgttttcttgtataactctttggagactgtgtgtctcggttatgtttatatttagttcacatttaattgataatgagatgttccttgagggaaaattactgaattgcttcttttattcaaattgttatttccctctgtgcaaagtaatttcagttagaatttgaaactacagttatcctggtctccgcgtggcatacattgatgaagttgaggagagggatggtgagaaggtgcaaaaggtcttctattcggtgctagtaaaagctcttgacaatcacgatcaggtaatcattttacgtgaagcgagttcaaactttcattttggttctgatttaaaccttcaatactcagtagtgcgttatgtacttttttgtcctgtgaaggaaatataccgcataaaattgccagggccagcgaaattaggtgaagggaaacctgaaaaccaaaatcacgcgatcatttttacccgcggagaagctttgcaaaccattgatatgaaccaggtgaacttcatggttatagtacctttttggtaagtaggttgcattctgtcttttgtacttatcaatgctgtttaggacaattatttggaggaagctttgaaaatgcggaatttgctggaagaattcaatgagaaccatggtattcgtcctccaacaattcttggagtacgtgaacacatattcaccggaaggtgtgttttaagctttgcagtaggttttacttagttttctttgtcaaaattgcaaatcaatgcctaacatctgacattgctggattgtagtgtgtcatctcttgcctggtttatgtcaaaccaggaaaccagctttgtgacaataggacagagggttcttgccaatccattgaagtaagtctgaatatactttgatatgtcctatttgaattaagcgcaatccatagttatcatatttatatgctgcaatatgagtagggagtgctgagcatctatggtgactatctcctggatgagcgcttatgtttttttttatcagctcttgaaatgcacacacatgtttgttggagattttagaggcagtaaggcaataaatattaaaacaaccaagtgctatttcctggaactttcctggcataaaatcttttgaagctaaacaatgtcatcaatttaaagtgtatattgtggtctaagtgctgtatatctgacatgctgtttcctgaaactttcctggcatcaaagcttttcaagctaaacaacgtcgccaatttaaagggtgtattattgtgtatgtgctgtatatctgacatgctgtttcctgtcagtaaagcttttcgagctaaaaaatgtcgtcaatttaaaatgtgtattatatctactccctccgttcctaaatataagtctttggagagattccactatgaatcacatacggatgtatgtagatgcattttagaatgtagattcatccattttgctccgtatgtagtccatagtggaatctctacaaagacttatatttaggaacggagggagtaagtgataaatatctgacatgctgtttcctgaaactttcctggctgagcttttcaagctaaacaatgttgttaatttaaagtgtgtggtatggtcattggtcattgctatgtatctgacattctcttttctgggcagggtacgttttcactatggacatcctgatgtgtttgataggatatttcacattacaagaggtggaattagcaaggcttcctgtggtataaacttgagtgaagacatttttgctggtatgtacttttccacctattctaactgttacctgtggatttttgagggaaatttaagaatggataggtccctaggacatccacatcctcgtatatgtgactcaaactgggtttgacaactgattcacacatgggccattatatgggcctcagacagactactctaaacttgattaagacactgatgctactcttatctaacacattaactcacattccaacatttcccatttctgctcttggacaacacaaacttaaattttctttttcaggtttcaactcaactctgaggcgaggaaatgtcacccatcacgagtacattcaagtcggaaaaggacgtgatgttgggttgaatcaaatttcactctttgaggccaaagtggcgtgtggcaatggagaacaagtgcttagcagagatatctaccgtttgggccaccgctttgacttcttccgaatgctctcatgttacttcacaactgtgggattttatgtcagctcaatggtacaaaacatctacctgcatcacatttgtcttgatttgccatcgtccatgttttttgatgttcttattactgtgcagatggttgtcataatagtatatgttttcttgtatgggaggctttatttagccttaagtggacttgagtttgcaattatgaagcaagcacgaatgagaggcaaccgtgctcttgaggcagccatggggtcccaatctattgtgcagctaggtctattgatggccttacccatgtttatggagatcggactggaaaggggttttagaagcgccctgggggatttcatcatcatgcagctacagctatgtgcagtattctttaccttttccctcgggacaaaatcacattattttggccgcacaatcctccacggtggtgcaaaatatagagcaactggcagaggctttgttgttcgccatgtaaagttcgctgaaaattacagaatgtatagcaggagtcactttgtgaaaggacttgagctcatgttactacttgtagtgtatgagctctatggtgatgtggcgacagattccacggcctatgttcttctgacatcatctatgtggttcttggtaatcacatggctgtttgctccattcctcttcaacccatcaggatttgaatggcaaaaggtggtggatgattgggatgattggaacaaatggataagcagccgtggcgggattggtgtgccggccaataaggcctgggagtcgtggtgggaagaggagcaggaacatctgctgtcaacaggcataatcggccgcatatgggaaatcatattatctctccgattcttcatgtttcagtacggtatcatgtaccatctgaatatctctaatggcaacaaaagcatatcagtaagtcatcctttatttttgctagtattttacaactctactcgaactaaatggatttcatgagactgattacatgatctttttgattgtttataatcactgtttactgatacaatttagtgactgtcccttcccaacttgattttgtggcttcagatttatggtctgtcttggctggtcactgtagcagtagtgttggtcctcaaggtaaatttcatttgcttgctgttgatgaaatcaataagtatatattggttggcgtatgcctctagtttatgtccttgttatgctgctgatatgctgccatttccttaggtggtatctatgggaagaaagaaatttagtgctgacttccagcttatgttccggctcctcaaattgttcttgttcattggatctgttggaactttggcgattcttttcacccttctgcaccttacagttggtgacatattcgccagcttccttgcctttgcacccacaggatgggccattctgcaggtacgtcatcactcatcagcaccaaagctttccttttgttttgttttaaggttttactcccagcttatcacgtgcgaggactgaggagtgaggagcagtatcaattcatagggagagagaaacgagagaattttgatcgagttaaagttgctattatcgaaattgacatctttcactggctctaatccgttcggcatcattgcaacagatatcacaggcaagcaagccagtggtgaaggcttttggtctgtggggatctgtgaaggccttgtccagggggtacgagtaccttatggggatcgtgatcttcgtgccagtggcggttctggcatggttcccttttgtctcggagttccagacgaggctgctattcaaccaggcattctcccgaggcctccaaatctctcgcattttggctggcggaaagaagcaaaactgaggcgagtctaggagatgggagatgttccatcacagtaatcacacagggtagacggaggcagaaattagctcgaggttcgttgttggaggggggcatcatatggctgctaacatactgacactttcagaagtttcttagtcttgtacacacagggcagttttccttaggcattttccatgtatatctcatgctaatacactcttacctctgatactagattgtacgttgcttgtatagatagatacatgcccccacaacagttgcgacaaaacattacggtgcttttagaggcaaagatgaaactgattttttgtgcatgaagcaacaaaacagttcggtctttctagattgagagatcaaatcgatttttgtgcatgaagatgtttgtgttgtgctgtacggtgtaccagtcagttccctgctttgtgcttgtgttgtctgaaactctgaatttaggctgatgtttgaacgcgctggcatttcccagctggaacctctgctttctataaaaaacaggcctgtatggcctttctaaaaatagtctgaattgatattacgtgagatctgtttttctagaatacaagagtaccttgcactggttcggactgttgcagcatatgagcataacataagttggacggctttttgcgttatgtttcatgcgtagacaaggataatgggacagaggttgtgaattatgacggtaggtacaactttacattaggtgaaggctgacatgagttaagatggaggacctgagtctgttatccttccagctttaagcaggccacctcacgtaatctgaattcacaaatgagctgaagcaacatcgattgcaatcataggagaccgatacagctttcagcttgtccctgcccgatgtctaatgattctccaagcgcagactgccaattaagtacacacgaggtgactgaaatcccacaacgacggtcatgatatcacaggaaaatttatatttttctgctttttaaaagttttttttctgcttttttgtttcccagctattgctgcattttggttcgagccatcatttctacggtcgggctgcttttgtagggtcagcgtgttttccgcgacaaattctcattgtgcctatcccgtcccccttcgcccactaggcaagaactctcagtgtcgtgactaggttttgacgtgcagagagtacacgacgcgtgatcgtgaggccaacacccaacagtaaatgcgagatgatggagctttgagtggccgtagatttgcaaaagcaatggctaacagacacatattctgccaaaccccaagaaggataatcacttttcttagataaaaaagaacagaccaatatacaaacatccacacttctgcaaacaatacatcagaactaggattacgccgattacgtggctttagcagactgtccaaaaatctgttttgcaaagctccaattgctccttgcttatccagcttcttttgtgttggcaaactgcgcttttccaaccgattttgttcttctcgcgctttcttcttaggctaaacaaacctcaccgtgcacgcagccatggtcctgaaccttcacctcgtccctataaaagcctagccaaccttcacaatcttatcatcacccacaacaccgagcaccacaaactagagatccatggcgctatcagctcctcccagtcaggaacagccgtcggggaagcaattcggctaccagctcgctgctgctgtgaggagcatcaactggacgtatgccatattttggtcagagtaaaatgcactagtggtcattgaacttattgcggccctaccctacctgtcagtgggtggaagtaagaagttgagggaaaataaaaatgctgctgtggggattcgaaccctatacctcgagctaatatgcgcgcaggctgaccagccgctttggctccaatcttgcgtctaattagaggacaagcccttttatatcttctagtcattcacgtgacagcgttgggatatttcttttttgcgtatgttcatataagaccattctattggtttagatgatagtgcattctaattcatagtgatttcttccatatcagttttagcgtaccaaattgcaccatcgcaagcgtagtttggctaacgtatatatttctgttgatagcatttataagcataatttggagtacttaacacgtgtatattacttttatgcatttaaacatttattaataaaattttatatagacatatattaaccattttgataagtacactccgccataattagctagtacaagatgaccgcacgccaaatccctggtcgtctcgtgctaaaaacagagcaatgacgcccaccaaatctactggagctgccgctgcggccgcgtcactgtcgagccaccgtccacgcgtgcatattgaacaaaagaaattgaagtgctaatccaatctcgttttcttgcgagggaagtgctaatgcaattttggccgtgaatcatatgtacgagtacacagtactgctaaaacagctttttaaatcctaaaaggcccgaccactgaagccgaaacgattatgatttaaatgccaaatggctcgcacgtaaaagaaaaaaaatgcaatggctgtcacgtgaatccagtaaaatataaatggtttttttctcaagttagacaagacgggagacaggtggagctggttgtcctgctcgggcaataagcgcgagggcccggttttgactccacacgggcgcataattttatttcctcctactcctttcttccaccactgacaggtagggcccacacagttagagaaaaaaaactgacaaggccttgttttttttttgcaatgacaaggccttgtttgaccaatcaaatagatgaaatacaaagctatacgatccaacagtgaccgtataatcatctcaacacgcatataatgactgtattgaccgtattcttaaatacagtgaccaaaataaacgtatacgataagttcaatgaccattagtgcattttactcttttggtcatttccgccagcccgcgcccacgccactcctcgtaatgaataaatgaccactctctatctctatatgtatcaatagatatcatatttgggtttgtagcaaacccacaaagttcgtacttttcatatatatagtgtccggcgtcgacgccgtcggttcgtttcgcagagttctggcgtggaaggatgggttctacaacggcgagataaagacaagaaagattgccggctcgaccactacggagcttagagcaactctagcagaccccgcaaaatgtcggcccgcaaaacgtgtttgcagttcgcgcaaaaccgcttttgcgggccggcgagggctagcacagatgcagacccctcaaacggacccgtaaaaaagtatattcacggaatatgcttttttacgggtcggctatgcgggttttgctcgggcaacagcgcacgacccgcaaacagcaaaactgcaaatctgaaatttgtcatagggctttacaaacaagttcaaattcaaatgacataaacagtttgcgcgcgaataaaagcgaagttgattacgcaaaagagggcatgcaaaggtatgcgcccatgtccggcattatcttgagggtcgatcttcactcggcgccatggagtccatcttgaagttcatcggcgccaccgtagccacctccgtcgcttgttccaactcccgcaccgaaatcatccacactgccaccgtatggagcagagaaaacatcaccggaactggcagacggaccggccgaggcgaccattctcctcttcaagatgtctctccttgccatatcatgccatgctttggtgacgtcgtctatgtcattgcagttcattgacatgatcttgttctcttcggcgagcaacaatgacagcgatttcttttcagaggcgcgtacttttctctcctcaatggcagctctgcgcagcccctcttctttgagcatttgccatttttcttgcttctcttttgccttcttttcggccaactctttcttgatctccaacgacttcaacaacattaactcgtttgattgcatcatggcatcaatcttctccctcaagctcgatgcttcttgctctctctttatcttctctctagtcttcttgtcgccatcgggcttgttcaaatttcttgggccatcatcatcttcatcttcatccatgtttgtaagtgagcctctctttggtggggactctttgtcgatcaacttccacttgttgcacttttggagcaactcccaacaatgctctaatttgaagaatctgccttccgaagcttccatgtctttgtatctatgttgagcaatcttgtcctacacaatgcgaacaagatgttgcaatcatttttcatgatacataatgatgatgcacaacttgaacaaaggcaaagcaaactcacatagtcggactccacggtgccacttggaggtgcattgcgtacttgctccaagcaagctgcccaacggctgcacatagacttgatgttctcccaacgaccttgaagcgaccgaaatgtgcggggagtcttgttggggtagtttttcataatgcggaagtattgatcttcggtcctttgccaatatctcttgccggtttgattagtacccgtgcatgcatcaagagacactgcactccatgctttgatcaaagcttgatcttccaagatggtgtagttctacgatctttggcttttcccagcttttgcttgtgaattctcaaacgcttccgcttcgatctcagccaagtcatccgcacaaccatagccgtccacgccgcactctatttcattgtagtcgaaaggttcgaagggggcttgatcaatgtcaaccgcgttcgtgtccaacaagttcacgaactcggttgttgcattgtttgaaccaccgctgtaacgaacgataagaagtcacgagctatcgataaacaatggcgaaaatgaaagagaatcaccaaagtccgaagagatataccttccggccatttcgtcaaacacctcgctcgcggggggagcggcaccgttgaacggcatcgccggagcacctccttgcggggggatggagtgagaggttgaagaagatttgttccttgaagtcggaaccttcctctgctatgcgcccgcgaccttgccggccttctccgccgccggccgggatcgcacagcggcattgccgcccggagcgcgggccatcgcggcgggggcagccggattcccgccttgcacaagcacgttgccctgccgcttgcgggcaggcgtggcgtgtgcttgggcgacgccggcggggcctacatggccggcgacgagatccgcccgagggaaaggggtgtgcgcgacctcgacggtgacgggggccagcatcgggtcgtccatggcgacgaaggacggccggggaggagcggccggaggagcagtcggagcttcggagggggggcaatggtggcggagggtgcgggaagcgggaaaggggacgcggaaatgtccctcccgccaaatctcgcgccggatgggggttgagctcgggtcggcctcccagcccgtgaagatagaggttgggggagaagatttatcgcgccccgcaaaattttttgcggaccggggcgttttgcggtgtttgctcgtatttttcggtcccaatccgcaatttgacggttattttacgggtcgggacgttttacggggcctgctagagttgctcttacagcggacgagcgcgtcatgcacagaagcaagcaactgagggagctccacgaatcgctcttgcccggcaactccaacaatcgggcaaggcgacctgccgcctcactgtcaccggaggatctcggggacggcgagtggtattacaccataagcatgacttacacctttcaccctaatcaagggtacgtagttatcaaccatgatgtatgcgatatatgtgcctgccatgtttcatgtcgtccttatttttatatacgggtacataacaaagacaaattttgtggttatgaaaatagtcacaaacatgcactattttttgttacaaattacatattaatttgcaccttttttagtagttatcttgttaatatatactgtcatgttgttgccaggaaaagatcacttcaagaaaattataaacaagcatatataatacgtccatacatatgtccaattattttcagccttttcttttttctaaattaaatacatagagtccaagcttcaaatcctgcacttaaacctcaagctaatctgttacactcccttgcagctagtctcttactagtattatctgttctttttttgaagaaaaaactttcgatctattcatcatcatcacagtaaaaaaacactagaagtaacataaattacatactccctctgttcggaattacttgtcacagaaatggatgtatctagacatattttagttctagatacatccattttcgagacaaataattccgaacggagggagtacatttctgtagaacaccttgcgacgattgcaaacattggtgtgcatgcccaaggcgcgctacactcatcgcccctccctcattggagcttggcaaacttaattgtagtagacggtagggaagtctttatgctaaggccttaaaggaccagcgctgtagaacaacaaccgtgaccattaaagaaaagaaaaaaagaaaagaaaagcatagatggaaaagattcaacatgtagacatataacacagcaaaactaaggccgaatccaagtatatccactaaactcaaacactgactgaatcccgcgagattcaccgacatgccctccgacaatgttagatgcatcatcgggatagggacttggcagggtgaaccttattttgtcttcagatagcagatgttgcctcaccttcctaagcagcacacaaacactaaataaaacttaaaaaacacttaaaatgaagtaggagcactctcaccggcaagagccacgatccattatgcctccatggccctaaagccagaggaagatcgacggcagcatcggcgggaggcgaagaagccctcgtttaatactgtcttgatactagctaccatagactgcagtggtaagatgtacatactgaagtgattttttttttctgtcggcgtgaatgtactcactaccaggttgccaggcaaaagctttgcgagcaatcaacatgtttggctgtacaacgctcagaacgcaaacaccagagttttcccccgcgcgctcttagcaaaggtatatctcttctacttatctcatattatgtgtgtatagcaatgatgcgggtcgggttttcaacccccttacataagaaaacatcgtttggtctttaactaataataatactccaaaacgtgcatgatgtcttcctacaccatccgatggtcaaatcagactgcttctattcaggtcagcacattacttcctactatagatagatagatagacgcacacatatacacatctctgatctcaaaccgttcacatatttccagacaatcgtttgcattcccttaatgggcggtgtgctggagctcggaacgtcggatcaggtcggtgcacatgagtttcaatttatgttctcagtaactctcagcatgttcttccgacttgccgacgggttcaacggtaaccttttaatattaggggtagctattttgtttgccaatacatgctagctatttttgtatgtgttgtcccagtctaccattctgccccttttgcatttgtgcgccattcctttttagtacattaatttacactagtcttccactgcgttttcctactactatgtattttatattatatttatgattatctttagagcaagtacaatagagtgatgtaggcgggctacaagagatgccacatcacttttatgcctagttgaagaagagaggagaggagagagagaagagaagcgggttacaaacaaaagtgaccccacctatatataaggcttttaatcagtagtgtctgcctcacacacacagatactctaggttcctcttaacacaccatctccctctgttcgactgtccctacacacagtctctatccatctctctctagatgtatgcccccataggagggtgactgccatcgacgtggatagtgattgggattgagatctcatggcaagggggaccagatatttacaccactggcgagggatccactagttgtatttgagagttgagactatcgatgacggatgcgttcaatgggtttttggcagtgcgtgaacttgcttttttctctttcccgtcccccgtataactctatctgagttgtattattgttatcagtaacgaaaagggtatacccgattaaaagaaaaggctgtatttgaggtactcatgtagtatatgttttgtatagtgggaaaaatgataatatatgtgtagcggccgcacgcatcttgaggacagattcttaagtacgtaccaccattagcggtaaaaatgcctttgcgagtagctaccacgttaacacttggccaagtttttcctttcgtcgtcgtccgtccacgtaaagcaaatgctattgacgattgacaaagtgtatcctatatttccaaggttttggaggaccccggcatggtgaagcggatcagcacgtctttctgggagctgcacttgccatcatccttggagtcgaaggatgcgagctccagcacatcagcaaacgataccagggaggccaccgacatcatcttgttcgaggactttgaccacaacgacacagttgagggggtcacctctgagcaaagggaggtccagtgcctgtccaacgtcaatctggagcgcctcacaaagcagatggacgagttccacatccttctcggtggactggacgtgcatcctctcgaagacagatggatcatggacgagccctttgagtttacgttttccccggaactggcgtcggctatggatatgccgagcaccgacgatgtcatcgtcactttaagtaggtctgaaggctctcgtccatcctgcttcacggcgtggaagggatcatccgagttgaaatacgtgcctggccaggtcgttggggagtcacagaagttgctgactaaagttgtggctggtggtgcatgggcgagcaattatggcggtcgcaccacggtgagagctcaggaaattaacaacaacacccatgtcatgacagagagaagacgccgggagaaactcaacgagatgttcctggttctcaagtcactagtcccgtccgttcacaaggtagtaatatgtagagtccatttacctttagcaaattgtacacgttgtttttcatagtttttttactgctggattgcaggtggacaaagcatccatcctcacagaaacgataggttatcttagagaactgaagcaaagggtagatcagctagaatccagccggtcaccgtctcacccaaaagaaaccacaggaccgagcaaaagccatgtcgccggcgctaggaagaagatagtctcggccggatccaagaggaaggcgccagggttggagagcccgagcaatgtcgcgaacgtgacgatgctggacaaggtggtgctattggaggtgcagtgcccgtggaaggagctgctgatgacacaagtgtttgacgccatcaagagcctctgtctggacgttgtctccgtgcaggcttccacatcgggtggccgtcttgacctcaagatacgagctaatcagcaggtatagatcgcacaaatttctacgatcgatatggcagtatatcaggaaatgtatagcgtgacttaaggatccatgattaccgtctcattcactgacattgctggattgttgcagcttgcggccggttctgctatcgtggcacctggggcaatcactgaagcgcttcagaaagctatataggcaagatgttttttgacattagtgtagtgctaaaaccgtcttatatttgggacgaagggagtacttagcgacgcaatctacaaaaaatcatgagttgggctctatagtcttcttcacccaggaatcaggtcggactagtgtgaattactgtacaccaaaaaaaaattccgaaataattactgaacacgtcatgacctcgccccaaaaaatatccagatctatattccgcctatcaattaagcacgaagtttgaagggagtgcctagaactcatttagatgagatataatttggtctcattcaccttgaaaacgaaaacaaaaacaacccacgtcagcacacacgcatcttatagcatcacatccaatggctataaaaggtgaatgacagcaaattatacctcatctagatgagttctagcaaaactgtaatttgaagccgactatgctgcccgaccctactcactactacagaaatgcctagctagcggtggcggcactaagagcccattcggattctttccagcttcctgcgatgccagccacagccagcttctgatgggatgggagtagcgtttcgttcgacagcagagggtagctct

SEQ ID NO: 174 - DNA, 2025 bp, Triticum aestivum
  source 1..2025: mol_type = unassigned DNA
atggcggagccggaggacggcggcgaggtcgcccctcctgaggcggcggcggcggcgacgagcgcggccgcccattcgtctccccctgctaaggaggagccggcggcagcggcagaggcaaagccggccagctccggcgaggcggtctccctcaactacgaggaagcgagagctctcttaggaaggctggaatttcagaaaggcaatgtagaagatgcactttgtgtgtttgatggaatagaccttcaagctgccattgagcgcttccagccatcatcctcgaagaaaacaacagaagctactcttgttctcgaagccatttacttgaaagcattgtcccttcagaagctaggaaaatcaatagaggccgctaaacaatgcaaaagcgtcatcgattctgttgaaagtatgttcaagaatggcactcctgacatcgaacagaagctacaagaaactatcaataaatctgtggaacttctcccagaggcctggaaaaaagctggctctcttcaggaaacatttgcttcgtacagacgcgctcttctcagcccgtggaacctcgacgaggaatgcattgcaaggattcaaaagagatttgctgctttcttgttgtatggttgtgtggagtggagtccgcccagctctggttcaccagctgaaggcacttttgttcccaagacaaatattgaggaagccattctactcctcacaacagtattgaagaagttttatcagggaaagacccactgggatccctcggtgatggaacacttgacctacgcattgtcgatttgcagccggccttctcttattgcagatcatctggaggaggttctacctgggatatatcctcggacggagagatggaacacactagcattttgctactatggtgttgctcagaaagaagtcgctctaaatttcctgaggaagtccttgaataagcatgagaacccaaaagatacaatggcattgctgttagccgccaagatatgtagcgaggactgccgtcttgcctccgagggtgtcgagtacgcaagaagagcgattgcaaacacggaatcattagatgttcatctgaagagcactggcctccatttcttggggagttgcctgagtaagaaggccaagattgtttcatccgatcaccaaagagctatgttgcacgcagaaactatgaagtcccttacggagtcgatgtctcttgaccgctacaacccaaacctaatattcgacatgggagttcaatacgctgagcagcggaacatgaacgccgcgctgagatgtgccaaagagtttgtcgacgcgaccggtggagcggtctcgaaaggttggaggtttctagccctagtcctctccgcacagcaaagatactccgaagcagaagtggcgaccaatgccgcgttagacgagaccgcaaagtgggatcaagggtcactgctcaggataaaggctaagctgaaggtcgctcaatcgtcgcccatggaggcggtggaggcataccgggtcctccttgctcttgttcaggcccagaagaattcgcctaaaaaagtggagggagaggctggtggagtaaccgagttcgaaatctggcaaggtcttgcaaatctgtactccggcctctcacacaccagggacgccgaggtatgtttgcagaaagccacagccctgaaatcgtactccgccgcgacactcgaagccgaaggttacatgcacgaggtgcgcaaggagagcaaggaggcgatggcggcctacgtgaacgcctcggcgacggagctggatcacgtgtcgtccaaggtggccatcggggctctgctctccaagcaggggggcaagtacctcccggcggcgagggccttcctctcggacgccctgagggtcgagccgacgaaccggatggcgtggctcaacctggggaaggtgcacaagctcgacgggaggatttccgacgccgccgactgcttccaggcggcggtgatgctcgaggagtcggatcccgtggagagttttaggacgctctcatga

SEQ ID NO: 175 - protein, 674 aa, Triticum aestivum
MAEPEDGGEVAPPEAAAAATSAAAHSSPPAKEEPAAAAEAKPASSGEAVSLNYEEARALLGRLEFQKGNVEDALCVFDGIDLQAAIERFQPSSSKKTTEATLVLEAIYLKALSLQKLGKSIEAAKQCKSVIDSVESMFKNGTPDIEQKLQETINKSVELLPEAWKKAGSLQETFASYRRALLSPWNLDEECIARIQKRFAAFLLYGCVEWSPPSSGSPAEGTFVPKTNIEEAILLLTTVLKKFYQGKTHWDPSVMEHLTYALSICSRPSLIADHLEEVLPGIYPRTERWNTLAFCYYGVAQKEVALNFLRKSLNKHENPKDTMALLLAAKICSEDCRLASEGVEYARRAIANTESLDVHLKSTGLHFLGSCLSKKAKIVSSDHQRAMLHAETMKSLTESMSLDRYNPNLIFDMGVQYAEQRNMNAALRCAKEFVDATGGAVSKGWRFLALVLSAQQRYSEAEVATNAALDETAKWDQGSLLRIKAKLKVAQSSPMEAVEAYRVLLALVQAQKNSPKKVEGEAGGVTEFEIWQGLANLYSGLSHTRDAEVCLQKATALKSYSAATLEAEGYMHEVRKESKEAMAAYVNASATELDHVSSKVAIGALLSKQGGKYLPAARAFLSDALRVEPTNRMAWLNLGKVHKLDGRISDAADCFQAAVMLEESDPVESFRTLS

SEQ ID NO: 176 - DNA, 9524 bp, Triticum aestivum
  source 1..9524: mol_type = unassigned DNA
ctcgaagtgcgttaaccaaaacaaatccaccaaagacggctctggactgatatggtgttaaatagcaaactgagtttcagaggatgaataggagaggtcagttagacagaaattgtgcacaaatcaaccaaagacagctgtaggcaaaagttctgttgaatggcaaacagggtttcagaaaaggaacaggataggtcagttagttgtgtactaagaactctcatctacactgcagttcacgaaaaaggaagaaccactcggtgcacgacatacccgagcatcatcctcctcctttgagacttctttgacaaccacctccacttcgcgtttgtaaagctgatcaaacaaatgagagacttgtaagccagcaaagcagtaatagtttacaatgtaaatattcttacggtaacagaactttacaagaagcaaatacttcagtggagatgaactagaatgaaccaaaataacttcagcaccaacttgctcactgaacacaagtagcatagagttgtatataagcctattctaccaaagagctactaagatgcaacaagtattggagagctcgtaaaattcattcaatacgcagatgaagaactgataaacgaactctggaaagcagagcctcaaaagccagcagagtaagctagtagttagtaagcaaatgcttgtgagccgcgacggagcattccaaactgcacggccatcgcggcatgtttatttctatcggggaaaagaagggggaagctaaccttgctctgctcgcgcatgagtatggcgaacttgtcgatgttggggacggcgagcatcttgggcatgaggtagttgcggaagtgccccggcgccaccttcaccgtctcccccgccttccccagcttgtcgatcgtctgaggtgaacaagcgatgggtgatgtcaaaggttagttccacttccccgcacaatctaaaatctctagggacattgttgaaatgaaaggccaaaactgaagctttatcggtcaaaaatactactgctagcttaaaaagtttcagaaatgctggagatttatcggtcaaactgtcgctgaggcggcaccggcctcaccggatcgaaagcaccccgctcgaactgaccggaaacgcaagcggctagcgagatcgcgggatgcatcctgcagaggtggaggaccgagcggagcgtcgcggggggaggggggcagggggggtggcttaccgtggtgaggatgacctcgagcttgcggtagcggaggccgtggccggagaagaggacggggttggtggcggcggcgccgaggccgtggcggcggaggagggcggcgcgggcggcggccatggtggagtagggttcaggggaaggaggcgacgggggccggcggctgccaccaacgggtgcgcgagtgagagtattggtggctcggcttcccgccggaccgggccggtgccaggccaggcccgctaagggatctccattttttcctttgattttatttttaaaatccttctgctgcccaaaagaatttgcattttgcactttcttgagccctctttgattttattttttaaatacttccgctgccatgaaaactttgcagtttccacttttttggatgaggaagtcgaccagagcggaaatctggaaaagagccagggttcttctgctggatgccaacaccctctgcaatccaataaaatcaaatcaaacattcaaaatctcatcagaatatcaactttatgtttttttcttaaggcacataaatgcatttttttgtaacataaaaggttatgtgagtttttagtccaatttgtttcgtagttggcaggttgaaactctaggactcggatatgtgctatactcaagcaccacatgttacattttattttgcgctgaaaatcaagacatgcatcattaactttcatatttcatgaaagttacaatagttagaccctctccatttcaatttccaaagatgtaggatgcaacaattccttttaccaccaagacatattaatattgtgtggtttccgtgatatgaactcccctatcccttggtggctatggtaaatctcccctccaggcttcatcaatgagaccgtggattcgcctcccctctacctgccgctccgacgactggtggcggggttagggatcccggtgctttcggtctggttaatagtttaggttaggtttttttagtcttcttaggtgtggcgctcagatggatggcagcgctttttctcgagtttgtgtttcggtctccgattctcctcaagttcgttcatctgaacgtaattgaaggacctccgacgtagatttctgtcgtctccttgctacgatgagtttagtgtttctcgtcgtgtgacgagatttgttgtcaggtgcttcagatctattgaagggttcaacggtgacgactacgactctagggcactagtccttacgggcacatgcatgaagacttcccgactgtcatcgtatggtcaagccggctacagtaggggaacaacggtagtggtcattcgatggtgaagaggcgttctttgtgggcaagccaaatgattctgatctattatcaatgttcaccagaaaaaacaaagcaccttgttgtttcaattttgcgaaaaatgattcaaatctattatcaatgttcaccagcaaaaaagaaaaataaagcaccttttgctttgctcttgagcaaaaattcttttgagtggaaaaaatacaccctgttgtttctctttgcagccaaggacaaagcataggttacgatcacatcttggtcaacatatgtggccgttcaagatcatccatgcatgcatttgtattggtggagctagacaatctatttttagcttgtcttagaaaaaaatctatcattagctcgaattttctggaaaaaattgtaaggactcccttaaatttctatcggtattcctgatgaactttccacgtggcaacaagcagtagagagagtagtcgcaaaagagtaaaaatagaagacagaaaaattagtggaaaagggtacgcatgcgaaccgtggaagaagttgccgcctccgctcctctccatcgacgacgaaaccgagcacctcccagctcgacgagatcgggtgcccgtcggtgcgatccctctgctgcagcggcatggcggagccggaggacggcggcgaggtcgcccctcctgaggcggcggcggcggcgacgagcgcggccgcccattcgtctccccctgctaaggaggagccggcggcagcggcagaggcaaagccggccagctccggcgaggcggtctccctcaactacgaggtccgaaatatctgaaactcttttatgaatgtttgtttgatacgtagtacggtgcttgtcctatataatgctgctatgatgtgaacttggtttgcaagaaattgccatgtttgaagtgtttggtcagtgccgccaatgttatgtcaaatttcgtattgccggcgatgatggtgtcaattcaattaagcgatgactttgattgttctcacataaaccgaaaatgtaaagatgccaacgttggtcgtgcgtttttttcaaaaaatattgtttgagaggctttgtgtgggaaatgtgttcctttcttggggatgtcaaatgctgaattgtgattccatttcagttctggttctatttcattgattggtttatccaattgcgaattattcggcaagtttataagacatgcacctttttttgttctttatatatttgggtgagtgaattataacacgatggtgtcaatcaaaatgctttttattgggtgagtgaattgtgaataatcttaatgccagtataggtagcaagattttactgaatgatgtgtaatcatacggagaaagggacattttctttgtccagattatgaagaactgatcatatttctattcccatgaaccatgctattgatctccattgcaattattaatttccaaaaatgaagttcaaacttagcttaatacatggagaattccaaccgtcatgctttctcgggtttattacaccaagttatttttttgcgggtttattacaccaagttcgtttatacatctatcggtaacaggaagcgagagctctcttaggaaggctggaatttcagaaaggcaatgtagaagatgcactttgtgtgtttgatggaatagaccttcaagctgccattgagcgcttccagccatcatcctcgaagaaaacaacagaagctactcttgttctcgaagccatttacttgaaagcattgtcccttcagaagctaggaaaatcaataggtaacaaaattgctttataccgttgtttaagtttaaaacaaattgctttaattgtgttttacaaaaataaattatcatttggaagttgttcttttttttagcttattctttgacttgtaacaaattactgaaatacctgttgaacatgcagaggccgctaaacaatgcaaaagcgtcatcgattctgttgaaagtatgttcaagaatggcactcctgacatcgaacagaagctacaagaaactatcaataaatctgtggaacttctcccagaggcctggaaaaaagctggctctcttcaggaaacatttgcttcgtacagacgcgctcttctcagcccgtggaacctcgacgaggaatgcattgcaaggattcaaaagagatttgctgctttcttgttgtatggttgtgtggagtggagtccgcccagctctggttcaccagctgaaggcacttttgttcccaagacaaatattgaggaagccattctactcctcacaacagtattgaagaagttttatcagggaaagacccactgggatccctcggtgatggaacacttgacctacgcattgtcgatttgcagccggccttctcttattgcagatcatctggaggaggttctacctgggatatatcctcggacggagagatggaacacactagcattttgctactatggtgttgctcagaaagaagtcgctctaaatttcctgaggaagtccttgaataagcatgagaacccaaaagatacaatggcattgctgttagccgccaagatatgtagcgaggactgccgtcttgcctccgagggtgtcgagtacgcaagaagagcgattgcaaacacggaatcattagatgttcatctgaagagcactggcctccatttcttggggagttgcctgagtaagaaggccaagattgtttcatccgatcaccaaagagctatgttgcacgcagaaactatgaagtcccttacggagtcgatgtctcttgaccgctacaacccaaacctaatattcgacatgggagttcaatacgctgagcagcggaacatgaacgccgcgctgagatgtgccaaagagtttgtcgacgcgaccggtggagcggtctcgaaaggttggaggtttctagccctagtcctctccgcacagcaaagatactccgaagcagaagtggcgaccaatgccgcgttagacgagaccgcaaagtgggatcaagggtcactgctcaggataaaggctaagctgaaggtcgctcaatcgtcgcccatggaggcggtggaggcataccgggtcctccttgctcttgttcaggcccagaagaattcgcctaaaaaagtggaggtttgttttcttaatcaaatgcagcaaaaaaaaagtaccatccgtatactatttttctcttggcactttctccattagttcacataccgatgcttcagggagaggctggtggagtaaccgagttcgaaatctggcaaggtcttgcaaatctgtactccggcctctcacacaccagggacgccgaggtatgtttgcagaaagccacagccctgaaatcgtactccgccgcgacactcgaagccgaaggtgagccgaaagctcaggtcaccaaacccttacaaaatttcaccccgatcgatgtacgagtcgatgcaatgcaatgcaggttacatgcacgaggtgcgcaaggagagcaaggaggcgatggcggcctacgtgaacgcctcggcgacggagctggatcacgtgtcgtccaaggtggccatcggggctctgctctccaagcaggggggcaagtacctcccggcggcgagggccttcctctcggacgccctgagggtcgagccgacgaaccggatggcgtggctcaacctggggaaggtgcacaagctcgacgggaggatttccgacgccgccgactgcttccaggcggcggtgatgctcgaggagtcggatcccgtggagagttttaggacgctctcatgagattatcacaacatacaggaactccttactttttctaccctccacattactcctctactctccttgtttctctctcttgttgtagttcaatgcatgtaaagttaaccgatgtgtataggcacaattgttttgcatatttatttattttgccgtgggacctgtatttgctcatggaaagtgtgatgctttcagaaaatgcaagtgtgatggcagctgaactgttacttgaatttcgcttttacttgcactgttttaattttgtatgagaatgatgacgccaaagccttgagttaacagcgctatttaatttacacttcacactgcacactctctatactattgatagcctgggcttattttttgttgccctctatacattctgcatagccatttttttctcttttttttgcgagggtaaagagttttgatagtaattgtggacttatcaggaagctgaacatatatagcaaatgtattgtaaagatggacctgccctatgctgttcttcatcttggcggaggaccggcggtggggagtggtttcggggaggccggggcggcaaggcggcacgggagcgctgccggctgcgggcggcggaggccggcggtttggccagtggtggctggcggcttaagggggtgaaggttgaagaagcactgtaggcctttgatttcacatccaatggctcagaaatcgactgaccacaaatgaaaattttagctgactgatttctagccatttccgtcaacaacacctgggttctgattagtttcttcaggaaagctagaatcagctactgccttcaagaaacaaaaatggtcgacggagggggacaggccagaaccatagaaccattcgtgttatcacccctgatcactgcagttgtgatgcttcgggcgggaacaagaatggacggaggaggacaagctggagatggaggccgagctacaagcagccgggcatcaaacaactaaatttctcaacctaaatggccctgtgcccctgtcctagtgtcgaatttgaatagaatgatgcaatcaattcttctgtaccgctcaaaagagtgataggatacatagttgcatcgcatgctgggacacagatcctctggctaaccctgccttaccctgcctttgggtcgctgacaagtgggccccacgcttggtgggacccatgtgtcagtgtctcaatggcaggttagccaaagtcaggggatcctcgtcccacatgctgatcaccaaaggagtacaatcaatataagtcgaacgtacttgagaacatacacaggcaaaataagacaattcttgtaaattcatcagtcgcaggacatggattttatgcattctaaagatatcaacatgagcttgtagatgcgggggaatgaacaaccagtttcacactattagatttattttagttaagcactcaagtcagcacaagctaaaccatgctataagctgggcataagaacaaccaaacttgagggaaaagggctaaaaaatgaaggcttctgcgataattaaaatgacaagccaccacgcttgctacaaaatagtatgtgtaccagaggattcttgttagaggcacggatgcatattcacaattccattttactcaaaaaattgttataaccactttaaggattctttcatatctattccaccaaggcatgaactgcttaatattgctaagttgcaactgaaacacaagttataacatgtcacaactaagccactagaaaatagaatcacaacgtgtcacaaaactgaaaagattgtgaaataaaaagaaatgggaaaaaagttgcaatctcaaaaaggagagattgtgcagtaaaaaagagaaaagaaacaacttgctatcgccagttaccagatcttgctagatgtatctactacccttatagaaacacctcaacgcctctaagaacacgtgcctgtccacgcggctcctcctcgcccgcctgccgcgtctccttcgccgcgcctcacccgcccatgctagaagaaatcaaacccccactgcggcgcacgaccacgtgccactcgccctgctcaacgcagccctcccagcgtccgtcctcctgggccaccgccgcagccgttgccatgtgtggatcctggacatcctcgtcgtttcatggaactgcttccaacacagtcgccggctgagtcattcacacgccgaagggggccgtcatccccatgctatgaacaatcataagttcattccttttgtcttctggctaaaatcactttgaatccacctctgtatacgagactgtaatctccagagtctcaagatacaagaccaagcttgttatttttccaagttgttcttgcaaggtcaagatatagtggcagtttctttttcgagtgtggtttttgtgcacccacggacattccacccacggtgcacccacgataaaaaacttagcaaaacatttaaaaaaattctgaaattttgtggatgtgattatgaccaaatgttttaggcgcttgcaaaatttggttgcaaaatgacacccatagagctttgtacaaaaaacaaagtttgtgttgaaaacatttgaacagtaaggtaggtgcagagcatcatttgtatttcgtttatatggagatcatttcatatttttcagtgaccaaactttgcaagctcctaaaacattggctcataatcacatccacgaagtttcagaatttttttagtttgtttacatttttttcttcgaatttactgttcactccataggtgcgccgaaggtggatgcatccactacttttctttcctttcctttttctctgtgtattttacatgttcgtacgtttgcaccctgctctgactgctttcttgttccaaggctggtgattctactccagagcttgctacggccatccaggcccagggcgaccatcactcgcggtggcgagaagcacttggtcgaagttgtgaaggttatagatgcgtacaaggtatacggcaagctccgtgttgagaggatgaaccggcaccaattgggagcttggatgaagaaggctacccgtgtggagaaagtggagaagaagtgatgagatgtttatgacagctaattgatgttgttatctaagtttctgaatgtgtgttttggtctgctcggataccttgtttgatatcaaatagccctttcttcccactgttcaaatcagctcttcattgatatgcaaatgttcaaacaatgtagttcaaatagttaagttgttatgccaggaa

SEQ ID NO: 177 - DNA, 2025 bp, Triticum aestivum
  source 1..2025: mol_type = unassigned DNA
atggcggagccggaggacggcggccaggtcgcccctcctgaggcggcggtggcggcgacgagcgcggccgcccattcgtctccccctgctaaggaggagccggcggcagcggcagaggcaaagccggccagctccggcgaggcggtctccctcaactatgaggaagcgagagctctcttgggaaggctggaatttcagaaaggcaatgtagaagatgcactttgtgtgtttgatggaatagaccttcaagctgccattgagcgcttccagccatcatcctcgaagaaaacaacagaagctactcttgttcttgaagccatttacttgaaagcattgtcccttcagaagctaggaaaatcaatggaggccgctaaacaatgcaaaagcgtcatcgattctgttgaaagtatgttcaagaatggcactcctgacatcgaacagaagctacaagaaactatcaataaatctgtggaacttctcccagaggcctggaaaaaagccggttctcttcaggaaacatttgcttcgtacagacgcgctcttctcagcccgtggaacctcgatgaggaatgcatcgcaaggattcaaaagagatttgctgctttcttgttgtatggttgtgtggagtggagtccgcccagctctggttcaccagctgaaggcacttttgttcccaagaccaatattgaggaagctattctactcctcacagtagtattgaagaacttttatcagggaaagacccactgggatccctcggtgatggaacacttgacctacgcattgtcgatttgcagccagccttctcttattgcaaatcatctggaggaggttctacccgggatatatcctcggacggagagatggagcacactagcattttgctactatggtgttggtcagaaagaagtcgctctgaatttcttgaggaagtccttgaataagcatgagaacccaaaagatacaatggcattgctgttagccgccaagatatgcagcgaggactgccgtcttgcttccgagggtgtcgagtatgcacgaagagcgattgcaaacacggaatcgttagatgttcaactgaagagcaccggcctccatttcttggggagttgcctgagtaagaaggctaaggttgtttcatccgatcatcaaagagctatgttgcacgcagaaactatgaagtcgcttacggagtcgatgtctcttgaccgctacaacccaaacctaatattcgacatgggagttcaatacgctgagcagcggaacatgaatgccgcgctgagatgtgccaaagagtttgtcgacgcaaccggtggagcggtctcgaaaggttggaggtttctagcactagtcctctccgcacagcaaagatactccgaagcagaagtggcgaccaatgccgcgttagacgagaccgcaaagtgggatcaagggtcactgctcaggataaaggctaagctgaaggtcgctcaatcatcgcccatggaagcggtggaggcataccgggtccttcttgctcttgttcatgcccagaagaattcgcctaaaaaagtggagggagaggctggtggagtaaccgagttcgaaatctggcaaggtcttgcaaatctgtactccagcctctcacactgcaaggacgccgaggtatgtttgcagaaagccagggccctgaaatcatactccgccgcgacactcgaagccgaaggttacatgcacgaggtgcgcaacgagagcaaggaggcgatggcggcctacgtgaacgcctcggcgacggagctggagcatgtgtcgtccaaggtggccataggggcgctgctctccaagcaggggggcaagtacctcccggcggcgagggccttcctctcagacgccctgagagtcgagccgacgaaccggatggcgtggctcaacctggggaaggtgcacaagctcgacgggaggatttccgacgccgccgactgcttccaggcagcggtgatgctcgaggagtcagatcccgtggagagttttaagacgctctcatga

SEQ ID NO: 178 - protein, 674 aa, Triticum aestivum
MAEPEDGGQVAPPEAAVAATSAAAHSSPPAKEEPAAAAEAKPASSGEAVSLNYEEARALLGRLEFQKGNVEDALCVFDGIDLQAAIERFQPSSSKKTTEATLVLEAIYLKALSLQKLGKSMEAAKQCKSVIDSVESMFKNGTPDIEQKLQETINKSVELLPEAWKKAGSLQETFASYRRALLSPWNLDEECIARIQKRFAAFLLYGCVEWSPPSSGSPAEGTFVPKTNIEEAILLLTVVLKNFYQGKTHWDPSVMEHLTYALSICSQPSLIANHLEEVLPGIYPRTERWSTLAFCYYGVGQKEVALNFLRKSLNKHENPKDTMALLLAAKICSEDCRLASEGVEYARRAIANTESLDVQLKSTGLHFLGSCLSKKAKVVSSDHQRAMLHAETMKSLTESMSLDRYNPNLIFDMGVQYAEQRNMNAALRCAKEFVDATGGAVSKGWRFLALVLSAQQRYSEAEVATNAALDETAKWDQGSLLRIKAKLKVAQSSPMEAVEAYRVLLALVHAQKNSPKKVEGEAGGVTEFEIWQGLANLYSSLSHCKDAEVCLQKARALKSYSAATLEAEGYMHEVRNESKEAMAAYVNASATELEHVSSKVAIGALLSKQGGKYLPAARAFLSDALRVEPTNRMAWLNLGKVHKLDGRISDAADCFQAAVMLEESDPVESFKTLS

SEQ ID NO: 179 - DNA, 9343 bp, Triticum aestivum
  source 1..9343: mol_type = unassigned DNA
tcgctaaaacacctgccccacggtgggcgccaactgtcgtggttctaagtctgacagtagagtgggggggtaggtatggagaggcaaggtcctagctatggagaggttgtaaacacaagagatgtacgagttcaggcccttctcggaggaagtaaaagccctacgtctcggagcccggaggcggtcgagtggattatgtttatatgagttacagggtgccgaacccttctgcctgtggaggggggtggcttatatagggtgcgccaggaccccagccagcccacgtaatgaagggtttaagggtacattaagtccgaggcgttactggtaacgccccacataaagtgtcttaactatcataaagtctacttaattacagaccgttgcagtgcagagtgcctcttgaccttctggtggtcgagtgagacttcgtggtcgagtccttcaattcagtcgagtgagttcctcgtaggtcgactggaaggtgatctcttctaagggtgtccttgggcagggtacttagatcaggtctgtgaccctaccctaggtacatgactccatcagggccggagtgccggaggagtgcgacgaggatcgggaggaagaagaggaggaggaggagccgaacctccttggcacccatggcccgacgcgtcagtgctgcgccggggggtacgccaatggcgggtcgttgccgccctcaaggtacgtgagcacgccctcgagtgtgcggccgggaacgccccaccagaggtgacgcccctcgttgttctgtcggccgccgaacaccggcgcaccgttggtggacgccaatcgctgctgctggcggcgctcgaaatacgccgcccaggccgcgtggttgtcggcggcgtactgggggagggagagttgggcatcggtgagggacgcgcgcacgatctcgacctcctcggcgaagtacttcggcttcgccacggcgtcgggcaacgggggaatgggtactcccccggcgctgagcctccaccccgatggcccggcgcgcatgtccggcggcgccgggatgttcgcctggaacaggagccaggactcctgttcacggagcgaacggcggccgaagccgttggccgccgcctcgtctccggggaagcgttctgccatggcaacggcggggtggggcgggctcgggagaggtagagggaggggccggagggcggcgctcgggagaggcagggagagggaggggttggacggcggcgagggggggactggtctgggcacaggcgagtggaggccgctggcttttatagccgggccgcgcccgtgtgtacgcgtgcgcgggaagggaggcgtcggcgcgccgccccgtgaagcgccgctcgtgaggaatcaatggcaaggctgaccggcggcagccttgccattgattctccgcggaaaaccgaggccgttgggggaagacgaggcgccgagtcgctgacgcggctggcccgcgtctttttcacgccaaaacagctcgccccggcacccccgggcgccccccagcgcgccgggttcgggctaggtccgccggcgctgttttcggcccaagccggcgaaaatcgggctcctgggtgcgcgactgggccgtttttcggcgccggcgcgaaaaaaacgcctggggaggccttcctggggcgcggctggagatgccctaaacttgcgcaccgcacctgggccaacgcaccccctttagtaccgggtcgtagctctaatcggtactaaaggtggggtcttttggttctccgatgatcgtttattctacaattgcccgattttaactagatttgctgctagtccgaagatctacttccgttcatttccatatgtgcatgtgttgcatggatatgagaagccgttgagatacacgggtatggacgcaacaaaatgaggcgtgcccggtcactgcccgcggacgcgaccggatacgtccgcggacgtttgaggggccatatttgtcatatgcggctgtagatgctctaacgtggcagtaacgaccgtgagcagttggcacgtgacggccggccttaatcaacatgtttctccatgccatgggcatctgtcatctgcgccattggtagtgcgaggagatgggacgcgggtgaccctgaggagggaggtaaaacctcctcctgcgcaagcagttgatggatggagcgcccttcaacccaatgctccataatccccaaatatggaggctcgtgggcttgatatgcaacgccttcataaatgataactatcaaagccgtatggctggcgtgtctgatatagtgatttttggtccaaaaggcgttactacgactttgttaaagttgctctaattgcatgcatgaccatccggtcatcttatctgtgccacacaatgaaatcgctcggcatgcaatttctgaaggctcctgagcaatttctacttgtaggcaccacacgaacgttgtgcactttttttgggatcacatcaactggccttcactaaatactactcagaacaagccactacacgttttgtcttgcactgtatatgttttctccaacgtcagactattttgagagagaaaaaacaccttgttgtttctcttttgcagccaagggcaaatcaaaagtaatgggatcgatcacatcttggtcaacataagtggccgttcaagagcaatgtattggcggagctagacaacctatttttacctttctctaaaaaataatctatcattaactcaaattttccggaaaatggcaggactcccttaaatttctctcggtattcctggcgaactttacacgtggcaacaagcagtagagagataggtagagagagtagtcgcaaaagactaaaaatagaagacagaaaaattagtggaaaaaaaggtaaacatgtgaaccgtggaagaagttgccgcctctgtttctctccatcgacgacgaaaccgagcacctccaagctcgacgagatcgggtgcccgtcggtgcgatccctctgctgcattggcatggcggagccggaggacggcggccaggtcgcccctcctgaggcggcggtggcggcgacgagcgcggccgcccattcgtctccccctgctaaggaggagccggcggcagcggcagaggcaaagccggccagctccggcgaggcggtctccctcaactatgaggtccgaaatatctgaaattcttttatgaatgtttgtttgatagtacggtgcttgtcctatataatgctgccatgctgtgaatttggttgacaagaaattgccatgtttgaagtgtttggtcagtgccaccaatgttatgtcaaatctcgtattgccgacgatgatgatgccaattcagtttagccatgactttgattgttctcacatgaaccgaaatgtaaagatgccaacgttggtcgtgcgttttccttgaaaaatattgtttgagaggctttgtgtgggaaatttgttcctttcttggggatgtcaaatgccgaagtgtgatttcatttcagttctggttctatttcattgattggtttatccaattgtgaattattcggcaagcttgtagacatggaccttttttgttctttaaatatttgggtgagtgaattgtgatttgtgaataatcttaatgccagtataggtagcaagattttactgaataatgtgtaatcatatggagaaagggacattttctttgtccagattatgaagaactgaccatatttctattcccacgaaccgtgctattgtatctccattgcaattattaatttccaaaaatgaaattcaaacttagcttaatacatggagaattccgaccgtcatgctttctccggtttattacaccaagttcttttgtttttgcgggtttattacaccaagttcgtttatacatctatcaataacaggaagcgagagctctcttgggaaggctggaatttcagaaaggcaatgtagaagatgcactttgtgtgtttgatggaatagaccttcaagctgccattgagcgcttccagccatcatcctcgaagaaaacaacagaagctactcttgttcttgaagccatttacttgaaagcattgtcccttcagaagctaggaaaatcaatgggtaacaaaattgctttataccgttgtttaaatttaagacaaatttctttaattgtgttttacaaaaataaatcatcatttggaagttgttctgtttttagcatatgtttgacttgtaacaaattattgaaatacctgttgaacatgcagaggccgctaaacaatgcaaaagcgtcatcgattctgttgaaagtatgttcaagaatggcactcctgacatcgaacagaagctacaagaaactatcaataaatctgtggaacttctcccagaggcctggaaaaaagccggttctcttcaggaaacatttgcttcgtacagacgcgctcttctcagcccgtggaacctcgatgaggaatgcatcgcaaggattcaaaagagatttgctgctttcttgttgtatggttgtgtggagtggagtccgcccagctctggttcaccagctgaaggcacttttgttcccaagaccaatattgaggaagctattctactcctcacagtagtattgaagaacttttatcagggaaagacccactgggatccctcggtgatggaacacttgacctacgcattgtcgatttgcagccagccttctcttattgcaaatcatctggaggaggttctacccgggatatatcctcggacggagagatggagcacactagcattttgctactatggtgttggtcagaaagaagtcgctctgaatttcttgaggaagtccttgaataagcatgagaacccaaaagatacaatggcattgctgttagccgccaagatatgcagcgaggactgccgtcttgcttccgagggtgtcgagtatgcacgaagagcgattgcaaacacggaatcgttagatgttcaactgaagagcaccggcctccatttcttggggagttgcctgagtaagaaggctaaggttgtttcatccgatcatcaaagagctatgttgcacgcagaaactatgaagtcgcttacggagtcgatgtctcttgaccgctacaacccaaacctaatattcgacatgggagttcaatacgctgagcagcggaacatgaatgccgcgctgagatgtgccaaagagtttgtcgacgcaaccggtggagcggtctcgaaaggttggaggtttctagcactagtcctctccgcacagcaaagatactccgaagcagaagtggcgaccaatgccgcgttagacgagaccgcaaagtgggatcaagggtcactgctcaggataaaggctaagctgaaggtcgctcaatcatcgcccatggaagcggtggaggcataccgggtccttcttgctcttgttcatgcccagaagaattcgcctaaaaaagtggaggtttgttttcttaatcaaatgcagcaaaaaaaaaagagagagtaccattcgtgtactatttttctcttggcacattctccattagttcacgtactgatgcttcagggagaggctggtggagtaaccgagttcgaaatctggcaaggtcttgcaaatctgtactccagcctctcacactgcaaggacgccgaggtatgtttgcagaaagccagggccctgaaatcatactccgccgcgacactcgaagccgaaggtgagccaaaggttcaggtcaccaaagtcttacaaaatttcacccgatcgatgcacgattcgatgcaatgcaggttacatgcacgaggtgcgcaacgagagcaaggaggcgatggcggcctacgtgaacgcctcggcgacggagctggagcatgtgtcgtccaaggtggccataggggcgctgctctccaagcaggggggcaagtacctcccggcggcgagggccttcctctcagacgccctgagagtcgagccgacgaaccggatggcgtggctcaacctggggaaggtgcacaagctcgacgggaggatttccgacgccgccgactgcttccaggcagcggtgatgctcgaggagtcagatcccgtggagagttttaagacgctctcatgagattatcacaacatacatgaactccttactttttttaccctctacattactcctctactctcatcgtttagcttccctgttgtagttcaatgcatgtaaagttaatcgatgtgtataggcgcaattttttttacgtatttatttattttgccgttggaccctctatacatactattgattgcctgggcttatttcttggtgccctctatatattctgcatagccatttcttagggagatcgtaattgtcgacttatcaagaagttgagcctatatagcaaaatgtattgtatagctggaccagccctatggtgttcctcatcttggcataatggggacaccactacactagcctcttcactgcttcacaaggtgtcaactgtcaaaccagcaaaacaaagagcaaacaaaccaattacttgcatattaaaacacatctccagtttcaggtccatgtgttcttattcatcaattcacgcccgagggactactttggatgggatctcgaccacatacctcctgtccaaggctatatatgattttagaaaccataatgttgagtgaacctgagaggtttttggatcgccagttggacaacaaccaaactgtggttgagttggttagtaggccacactaccggagttcaagtcctatcaggcacaacatatttttacgttccacaagagaaaactgcctccaggaaacctaccccagcccatgttcaagccatcacagaaaacaagaacaatttgatgctgcagctaacaagaacaattaactcactcgttggcatttccactaaactgttccaaagaaaatatgatgcctaaaaaggaatgtcatctccgtattcgtacacacgcttcgaatgcatgtgctactcagcgatatgcggatccagcgccataaccttgtcgaatagggatctaacatacccatatgaccgcatctgcagaatgcataaataaatatatctttacatgagatccattcaacggacactcctgccgtgcatccaactgcaagattgcatccggaattcataaaacaaatactgtactatcatccaggagaatggagtatatatatataacaccaggctgaggaaggaggacacaaattcaaccgaatacggacgtacatggcgggagaaacaactactatgaaagatcttcccgcttattattaattatattatttgactgaggaaataacacaacacaagcaagcaagcaaggaaattaagcgcgggaggaataggtagtacatgcaatcacgcggacggacggacggcgtcctcgcactcgtcaatctcggcgaggctgccagactcaaccagacccacacggaacaacttggagtaggagatgtccccggagacggtgacgtcgacggagttgcagacccagtcctggcgttcccgggtgaggacgaggaggcacggccggatgcatctcgggtccgtgaagctgaattcgtcggtgctgccacggttgaacctggcaccgtcgcggtcgtcttcccagtgtgtcacgacggggctgccgtcctgcaggttgtcgccgtacaaccggaactccacgaatgcctccgtgccggccggaggccagagccccgtcttcaccttcacccggtactcacagtcccccttggtggtgccgctgccggcgaggaaggcggccaccagaatgacaagggcgagcttgggcatgcccatggccacctgcgttagtttagtagctacgatagatagatagatagatagatatatgacgatgacggttgatggatggatggatcagcttcccaccggcatttatatagggtgtttatttgcccagctccagctgcatttatatagggtgtttatttgcccagctccagctgctgcccctaacccatattaataagctagcttattatccctgattcgcatacagccgtgatcgataccagacatcacatgatgagatcagatcaggtcagatcgatcagatggatgataagctttatcaattcccggccggacacgcaagttggtctcccgagaccgaccggcaaatcaagcgcccgatcgcatcacatgcacaacatcaatcttccctttctgggcttaccaataacattaactaactatatacatttccatgcagtgcagagcttcatttaccactaataatggaatggaatacaagtattggatgggatcgggtctggattaattgtatatattttctctctgaaaaaacgatcgatctgacagagttgcgcgccggagctgcagcaacacgacggtgggagtagattgagaactcgggatacgttttctggtatttttttcacgaaatttcacaggggagtagattgagaacccaagttcaatatcccaaaatttcagtttattttttaaaaaaattactatttttttatatttaatattcgtataggggggtggagcacccagaaactcttgtgtatttgtcccttgctcttctttatgcaaattttacaaatgtagtcagtataataggctttttaatacttatgttcctcttaccgcattttattttacctcgcaaggcaaaactgaccaagctaagccaatctgctctctatcacaatcatttatttaggacatggagctaagggcatctccaaggtggacccacaagcctcccacaatcatcccgactgtgctgtccggaccgccgaagccatccaacgcggtctcgtatcggtccgcggggcggcccggacgcgatttctccagcaaaacggagacaaaagtgggggagctttgcaggagtccgaaacacgaaacgtagaagtccaacaccctaggcccacccaaaacccttcccggaccccgcgactccttccttctttctctgttgccgttgccgccactccaccaccccggccgccacgccacacccctgccgaaaatctgcgtctccatcacctccggcgctccagcagggctccccgccgcttctcctccgtctccgttcaaccccctgtcctccaaccgccccgccatatacgatcctctcctgtgcctggcaacacttcaatgaatcgccggagctcagaactgtgtcccttctttttagcaatggattccaatttggagtacatataggagcatctttataatcacctagttacgttgtaggccgtttgtgcaccatgatgcggtgacgtgctgccctgtgcctccttccctcctcggcaccacgtcgtcgccagtccacca

SEQ ID NO: 180 - DNA, 2025 bp, Triticum aestivum
  source 1..2025: mol_type = unassigned DNA
atggcggagccggaggacggcggccaggtcgcccctcctgaggcggcggcggcggcgacgagcgcggccgcccattcgtctccccctgctaaggaggagccggcggcagcggcagaggcaaagccggccagctccggcgaggcggtctccctcaactacgaggaagcgagagctctcttgggaaggctggaatttcagaaaggcaatgtagaagatgcactttgtgtgtttgatggaatagaccttcaagctgccattgagcgcttccagccatcatcctcgaagaaaacaacagaagctactcttgttcttgaagccatttacttgaaagcattgtcccttcagaagctaggaaaatcaatagaggccgctaaacaatgcaaaagcgtcatcgattctgttgaaagtatgttcaagaatggcactcctgacatcgaacaaaagctacaagaaactatcaataaatctgtggaacttctcccagaggcctggaaaaaagctggttctcttcaggaaacatttgcttcatacagacgcgctcttctcagcccatggaacctcgacgaggaatgcatcgcaaggattcaaaagagatttgctgctttcttgttgtatggttgtgtggagtggagtccgcccagctctggttcaccagctgaaggcacttttgttcccaagaccaatattgaggaagctattctactcctcacaacagtattgaagaagttttatcagggaaagacccactgggatccctcggtgatggaacacttgacctacgcattgtcgatttgcagccggccttctcttattgcagatcatctggaggaggtactacctgggatatatcctcggacggagagatggaacacactagcattttgctactatggcgttggtcagaaagaagtctctctgaatttcttgaggaagtccttgaataagcatgagaacccaaaagatacaacggcattgttgttagctgccaagatatgtagcgaggactgccgtcttgcttccgagggtgtcgagtatgcaagaagagcgattgcaaacacggaatcattagatgttcatctgaagagcaccggcctccatttcttggggagttgcctgagtaagaaggccaagattgtttcatccgatcaccaaagagctatgttgcacgcagaaactatgaagtcgcttacggagtcgatgtctcttgaccgctacaacccaaacctaatattcgacatgggagttcaatacgctgagcagcggaacatgaacgccgcgctgagatgtgccaaagagttcatcgacgcaaccggtggagcggtctcgaaaggttggaggtttctagcactagtcctctccgcacaacaaagatactccgaagcagaagtggcgaccaatgccgcgttagacgagaccgcaaagtgggatcaagggtcactgctcaggataaaggctaagttgaaggtcgctcaatcatcgcccatggaggcggtggaggcataccgggtccttcttgctcttgttcaggcccagaagaattcgcctaaaaaagtggagggagaggctggtggagtaaccgagttcgaaatctggcaaggtcttgcaaatctgtactccaacctctcacactgcagggacgccgaggtatgtttgcagaaagccagagccctgaaatcgtactccgccgcgacactcgaagccgaaggttacatgcacgaggtgcgcaacgagagcaaggaggcgatggcggcctacgtgaacgcctcagcgacagagttggagcacgtgtcgtccaaggtggccatcggggcgctgctctccaagcaggggggcaagtacctcccggcggcgagggccttcctctcggacgccctgagggtcgagccgacgaaccggatggcgtggctcaacctggggaaggtgcacaagctcgacgggaggatcgccgatgccgccgactgcttccaggcggcggtgatgctcgaggagtcggatcccgtggagagttttaggacgctctcatga

SEQ ID NO: 181 - protein, 674 aa, Triticum aestivum
MAEPEDGGQVAPPEAAAAATSAAAHSSPPAKEEPAAAAEAKPASSGEAVSLNYEEARALLGRLEFQKGNVEDALCVFDGIDLQAAIERFQPSSSKKTTEATLVLEAIYLKALSLQKLGKSIEAAKQCKSVIDSVESMFKNGTPDIEQKLQETINKSVELLPEAWKKAGSLQETFASYRRALLSPWNLDEECIARIQKRFAAFLLYGCVEWSPPSSGSPAEGTFVPKTNIEEAILLLTTVLKKFYQGKTHWDPSVMEHLTYALSICSRPSLIADHLEEVLPGIYPRTERWNTLAFCYYGVGQKEVSLNFLRKSLNKHENPKDTTALLLAAKICSEDCRLASEGVEYARRAIANTESLDVHLKSTGLHFLGSCLSKKAKIVSSDHQRAMLHAETMKSLTESMSLDRYNPNLIFDMGVQYAEQRNMNAALRCAKEFIDATGGAVSKGWRFLALVLSAQQRYSEAEVATNAALDETAKWDQGSLLRIKAKLKVAQSSPMEAVEAYRVLLALVQAQKNSPKKVEGEAGGVTEFEIWQGLANLYSNLSHCRDAEVCLQKARALKSYSAATLEAEGYMHEVRNESKEAMAAYVNASATELEHVSSKVAIGALLSKQGGKYLPAARAFLSDALRVEPTNRMAWLNLGKVHKLDGRIADAADCFQAAVMLEESDPVESFRTLS

SEQ ID NO: 182 - DNA, 8714 bp, Triticum aestivum
  source 1..8714: mol_type = unassigned DNA
acactacattctaaacataatatctagaagccgagaggtagaagaagactttttcaaggcaaaatattcaatattttcaacaccagatttagaatgggcttgaagtgcgttaacaacagatcctccaaagacagatctgggcagaaattgtgttaaatggcaaacagggtttcagagaaggaacaggacaggtcagttagttgtgtgctaagaactcatcgacacttcagttcatgaaaaaggaagaactaatcagtgcacgacatacccgagcatcatcctcctcctttgagacttctttgacaaccacctcctcttcacgcttgtaaagctgatcaaacaaatgagagacttgtaagcctaaaaagtaacagtttacactgcaaatattcttacagtgactgaactctacaagaagcgtacttcagtggagatgaactagaatgaaccacgatgacttcagtacaacttcctcactgaacactagcatagagttgcatataaggctattctaccaaagagctaaggtgcaacaactattggagaactcgtacaaatcatacaatacacagaggcagaactgatatacgaaactccggaaagcatagcctcaaaagccaacaagagtaagctagtaagtaatgcttgtgagctgcaaccgagcattccaaaactgcacggccatcgtagcatgtttatttctatcggggaaaaggaggaagctaaccttgctctgctcgcgcatgagtatggcgaacttgtcgatgttggggacggcgagcatcttgggcatgaggtagttgcggaagtgccccggcgccaccttcaccgtctcccccgccttccccagcttgtcgatcgtctgaagtgaacaagcgatggacgatggcaaaggttaataattccacttcccggcacattgaaaatctctagggatattgttgaaatgaacagccaaaaccgaagctttaccggtcaagaatactactgctagcttaaaaagtttcagaaatgctgaagatttatcggtcaaactgtcgctgaggcggcaccggcctcaccggatcggaaacatcccgctcgaactgaccggaaacgcaagcgggatgcatcctgcagaggtggaggaccgagcggagggtcgcgggttgagatttggaggagaaggggagggagggggcaggggggctggcttaccgtggtgaggatgacctcgagcttgcggtagcggaggccgtggccggagaagaggacggggttggcggcggcggcgccgaggccgggacggcggaggagggcggcgcgggcggcggccatggtggagtagggttcaggggaagggggccggcggctgccacaaaacgggtgcgcgagggagagtattggtggcttcccgccggaccgggccggtgccaggccaggcccgctaagggatctccattttttccctttgaatttatttttaaaacacttctgctgcccaaaagaatttgcatttgcattttcttgagtccctttgatagactaaaaaaaatctcgagtccctttgatttatttttcaaaattcttctgctgccatgaaaactttgcaatttgcactttcctgagcgaggtagtagaccaggaaagaaatccggaaaagagtagggattcttctgccggatgccagcaccctccgcaatccaataaaaatcaaatcagacattcaaaatctcatcaaaatatcaactttaggccttttttctgaaggcacataaatgctatttttcgtaacataaaggttatgtgagtttttagtccaatttgtttcatagttggcaagtcaaaactcttggacttggttatctgatatattcaagcaccacatgttacatgttattttgcgctgaaaatcaagatatgtatcattaattttcctatttcaggaaagttacaatagttagaccctctccatttcaatttccaaagatgtaggatgcaacaatttttcttaccaccaagatatattaatattgtgtggttttccgtgatatgaactcccctatcccttggcagctatggtaaaatctcccctccaggcttcatcgacgagaccgtggattcgcctcccccttacctgccgatctgacgaccggtggcggggttaggcatcccggtgcttccgctgcggttaatagtttaggttagttttcttttagtcctcttaggtgtggcgctcatatggatggcagcgctttttcttcgagtttgtcttttgggctccgatgctcctcgagttcgtccattagaacgtaattgacggagctccaacgtagattcctaccgtctccttggggcagtgagtttagtgtttctcgtcgtgtgatgagatttgatgtcaggtgcttcagatctattgaagggttcaacaatgacgactgcggctctagggcgctggtccttacaggcggctctagggcgttggtccttacgggcacatgcacgaagccttcccgactgtcatcgataatgtcaagccggctacagtaggggagcggtgacagcgacgtgtcggcagctcgttctgacggcggaattggtcgttcggtggtgaagaggcgttcttcgtgggcaagccaaatgattcagatctattatcaatgttcaccagaaaaattacagcaccttgttgtttcaattttgcgaaaatgattgaaatgtattatcaatgttcaccagtaaaaaaacaaagcaccttaaaaaatttcagaggaaaaaaaacaccctgttggacaaagaataggttacgatcacatcttggtcaacatatgtggccgttcaagatcaatgtgttgacggcgcccacgatccatgcatgcatttgtatcggtggagctagacaatctatttttagcttttctcttagaaaaaaaaaactatcattagctcgaattttctggaaaaaattgtaaggactcccttaaatttctatcggtattcctgatgaactttacacgtggcaacaagcagtatggagatagctagagagagtagtcgcaaaagactaaaaatagaaggcagaaaaattagtggaaaaaggtacgcatgcgaaccgtggaagaagttgccgcctctgtttctctccatcgacgacgaaaccgagcacctcccagctcgacgaaatcgggtgcccgtcggtgcgatccctctgctgcattggcatggcggagccggaggacggcggccaggtcgcccctcctgaggcggcggcggcggcgacgagcgcggccgcccattcgtctccccctgctaaggaggagccggcggcagcggcagaggcaaagccggccagctccggcgaggcggtctccctcaactacgaggtccgaaatatctgaaactcttttatgaatgtttgtatgatagtagggcgcttgtcctatagtataatgctgctatgctgtgaacttggttgacaagaaattgccatgtttgaagtgtttggtcagtgccaccaatgttatgtcaaatttcgtattgccggcgatgatgatgtcaattcaattaagccatgactttgattgttctcacatgaaccgaaaatgtaaagatgccaacgttggtcgtgcgtttttctcgaaaaatattgtttgagaggctttgtgtggaaatttgttcctttcttggggatgtcaaatgccgaagtgtgatttcatgtctgttccggttctatttcattgattggtttatccaattgtgaattattcggcaagcttataagacatgtaccttttatgttctttaaatatttgggtgagtgaattataacacgatggtgtcaatcaaaatgctttttattgggtgagtgaattacgaataatcttaagagtgaattccggtttttacccctaatttagcatttttacactagttacccccattgaacaatttttcatccagattaccccacttagtgacaatcttgactgtttttaccccttttaatttttataagagccttcttgcaaagttcgtgttttactgagagtccagactaagtgcccaagcatatatttatattaaaacaaaaaatccgatcctattatgttaataactggcagtactaattttaaatggacacacatcattggagcccaactgaaaaacacatgtttgacaatagcactacagatctgtaaaatagaatgtgatgtttttatttgatgatttcccaaagcctaaaataaatgcttcatctgatgttttgcatcaaggaagaaaactaaaatatcatcacactaaacctacgaaccacaacccacaatgcaaaattgaatgtactttaccgctcaagataattgttcgtctttcctgcaatgtggtgcacacatacacctgacagccatgagaaaaaaaaaacgagtgcggctaaaccaagtgaccggtttgggcattggaaaaaaaatgccaagaggaatctgatggcagggaattagctgacagatcgctctcaaaagaattactggggtaaaaactggcaaacttttgctaaatggggtaaccaggatgaaaatatatttaatggggtagttagtgtaaaaaatgttaaagtagggggtaaaaactggaattcactctaatcttaatgccagtataggtagcaaaattttaactgaataatgtgtaatcatacggagaaaggggcattttctttgtgcagattacgaagaactgatcatatttctattcccatgaaccgtgctattgtatctccattgcaattattaatttccaaaaaggaagttcaaatttagcttatacatggagaattccaaccgtcatgctttctccggtttattacaccaagttttttttttgtgggtttatgacaccaaattcgtttatacatctatcaataacaggaagcgagagctctcttgggaaggctggaatttcagaaaggcaatgtagaagatgcactttgtgtgtttgatggaatagaccttcaagctgccattgagcgcttccagccatcatcctcgaagaaaacaacagaagctactcttgttcttgaagccatttacttgaaagcattgtcccttcagaagctaggaaaatcaataggtaacaaaattgctttataccgttgtttaagttaaaaaaaatgctttaattgtgttttacaaaaataaattatcatttggaagttgttctgtttgtagcttatgtttgacttgtgacaaattattgaaatacctgttgaacatgcagaggccgctaaacaatgcaaaagcgtcatcgattctgttgaaagtatgttcaagaatggcactcctgacatcgaacaaaagctacaagaaactatcaataaatctgtggaacttctcccagaggcctggaaaaaagctggttctcttcaggaaacatttgcttcatacagacgcgctcttctcagcccatggaacctcgacgaggaatgcatcgcaaggattcaaaagagatttgctgctttcttgttgtatggttgtgtggagtggagtccgcccagctctggttcaccagctgaaggcacttttgttcccaagaccaatattgaggaagctattctactcctcacaacagtattgaagaagttttatcagggaaagacccactgggatccctcggtgatggaacacttgacctacgcattgtcgatttgcagccggccttctcttattgcagatcatctggaggaggtactacctgggatatatcctcggacggagagatggaacacactagcattttgctactatggcgttggtcagaaagaagtctctctgaatttcttgaggaagtccttgaataagcatgagaacccaaaagatacaacggcattgttgttagctgccaagatatgtagcgaggactgccgtcttgcttccgagggtgtcgagtatgcaagaagagcgattgcaaacacggaatcattagatgttcatctgaagagcaccggcctccatttcttggggagttgcctgagtaagaaggccaagattgtttcatccgatcaccaaagagctatgttgcacgcagaaactatgaagtcgcttacggagtcgatgtctcttgaccgctacaacccaaacctaatattcgacatgggagttcaatacgctgagcagcggaacatgaacgccgcgctgagatgtgccaaagagttcatcgacgcaaccggtggagcggtctcgaaaggttggaggtttctagcactagtcctctccgcacaacaaagatactccgaagcagaagtggcgaccaatgccgcgttagacgagaccgcaaagtgggatcaagggtcactgctcaggataaaggctaagttgaaggtcgctcaatcatcgcccatggaggcggtggaggcataccgggtccttcttgctcttgttcaggcccagaagaattcgcctaaaaaagtggaggttagttttcttaatcaaatgcagcaaaaaaagtacgatccgtatactatttttctcttggcactttctccattagttcacgtactgatgcttcagggagaggctggtggagtaaccgagttcgaaatctggcaaggtcttgcaaatctgtactccaacctctcacactgcagggacgccgaggtatgtttgcagaaagccagagccctgaaatcgtactccgccgcgacactcgaagccgaaggtgagccgaaggttcatgtcaccaaaccctcaaaaagtttcacccaattgatgtacgattcgatgcaatgcaggttacatgcacgaggtgcgcaacgagagcaaggaggcgatggcggcctacgtgaacgcctcagcgacagagttggagcacgtgtcgtccaaggtggccatcggggcgctgctctccaagcaggggggcaagtacctcccggcggcgagggccttcctctcggacgccctgagggtcgagccgacgaaccggatggcgtggctcaacctggggaaggtgcacaagctcgacgggaggatcgccgatgccgccgactgcttccaggcggcggtgatgctcgaggagtcggatcccgtggagagttttaggacgctctcatgagattatcacagcatacatgaactccttacttttttttaccctccacattactcctctactctccttgtttatctctcctgttgtagttcaatgcatgtaaagtctttttttcgggaaatcttccgatctattcatcttcaatcatggcagtacaacgaataccaaaaataataaaaattacatccagatccgtagaccacctagcgatgactacaagcactgaagcgagccgaaggatcgccgtcgtcatcgcccctccattgtcagagtcgggcacaacttgttgtagtagacagtcgggaagtcgtcgtgctaaggcctcataggaccagcgcaccagaacagcaatcgcagcagatgaagaataacatagatcggaaggatccaatccgaagacacacgaacgtagacgaacaccaacgagatccgagcaaatccaccaaagttagatccgccggagacacacctccacacgcccaccaacgatgctagacgcaccactggaacgggggctaggcggggagacctttattcctgttggggaacgtagcagaaattcaaaaaatttctacgcatcaccaagatcaatctatggagtactctagcaacgaggggaaggggagtggatctacataccattgtagatcgcgatgcggaagcgttgcaagaacgtggatgagggagtcgtactcgtagtgattcagatcgcggttgattccgatctgagcaccgaagaacggtgcctccgcgttcaacacacgtacagcccggtgacgtctcccacgccttgatccagcaaggagagagggagaggttggggaagactccatccagcagcagcacgatggcgtggtggtgatggaggagcgtggcaatcccgcagggcttcgccaagcaccgcgggagaggaggaggagggagaggggtagggctgcgccgaaagagagacgttctcgtgtctcttgggcagcccaaacctcaactatatataaggggggagggggctgcgccccctctagggttcccaccccaagaggaggcggctagccctagatcccatccaaggggggcggccaaggggaggagagggggggggcgccactagggtgggcctcaaggcccatctggacctagggtttgccccctcccactctcccatgcgcttgggccttggtgggggtgggggcgcaccagcccacctggggctggtcccctcccacacttggcccacgcagccttctggggctggtggccccacttggtggacccccgggaccttcccggtggtcccggtacattaccgatatcacccgaaacttttccggtgaccaaaacaggacttcccatatataaatctttacctccgaaccattccggaactctcgtgacgtccgggatctcatccgggactccgaacaatattcggtaaccacgtacatgctttccctataaccctagcgtcatcgaaccttaagcgtgtagaccctacgggttcgggaactatgtagacatgaccgagacgttctccggtcaataaccaacagcgggatctggatacccatgttggctcccacatgttccacgatgatctcatcggatgaaccacgatgtcggggattcaatcaatcccgtat

SEQ ID NO: 183 - DNA, 669 bp, Triticum aestivum
  source 1..669: mol_type = unassigned DNA
atggagagatcccgccgcctgctgctggtggcgggcctgctcgccgcgctgctcccggcggcggcggccgccttcgggcagcagccgggggcgccgtgcgagcccacgctgctggcgacgcaggtggcgctcttctgcgcgcccgacatgcccaccgcgcagtgctgcgagcccgtcgtcgccgccgtcgacctcggcggcggggtcccctgcctctgccgcgtcgccgcggagccgcagctcgtcatggcgggcctcaacgccacccacctcctcacgctctacagctcctgcggcggcctccgtcccggcggcgcccacctcgccgccgcctgcgaaggacccgctcccccggccgccgtcgtcagcagccccccgcccccgccaccgtcgaccgcacctcgccgcaagcagccagcgcacgacgcaccaccgccgccgccgccgtccagcgacaagccgtcgtccccgccgccgtcccaggaacacgacggcgccgctccccacgccaaggccgcccccgcccaggcggctacctccccgctcgcgcccgctgctgccatcgccccgccgccccaggcgccacactccgccgcgcccacggcgtcatccaaggcggccttcttcttcgtcgccacggccatgctcggcctctacatcatcctctga

SEQ ID NO: 184 - protein, 222 aa, Triticum aestivum
MERSRRLLLVAGLLAALLPAAAAAFGQQPGAPCEPTLLATQVALFCAPDMPTAQCCEPVVAAVDLGGGVPCLCRVAAEPQLVMAGLNATHLLTLYSSCGGLRPGGAHLAAACEGPAPPAAVVSSPPPPPPSTAPRRKQPAHDAPPPPPPSSDKPSSPPPSQEHDGAAPHAKAAPAQAATSPLAPAAAIAPPPQAPHSAAPTASSKAAFFFVATAMLGLYIIL

SEQ ID NO: 185 - DNA, 5857 bp, Triticum aestivum
  source 1..5857: mol_type = unassigned DNA
cgcttctgcaaaaatctccactagccattgcataagctcaggaaaattacctttatgtagtgaaacttctctccatcatgttcacgaaaatctaacccttgacaaaaaaggaacctcgggcattaaaaggaatatgtcaggccagctctatataaaaccttgtctcgtttgatggttgaacaaaatgactctatgattgttgtgtttgctgcaatgaagaaattgtatttctcttgtgctttgttacgtgcacactgcactattgatttcaccgacatgtttcacaaaactatccttgtgattctaatttctaagtcacccattcaccaaaaatctccaccaacatgcaaattatcattgaaaagataacatacaagcataaagcaccatctagttctttactatactcaagccaactataagacttaaaccatttagctacaaatattgttgcacacctccggtggggtgttgtggaaaagcatattttttcggtcaacaagccccttttgcaatgtatcctcttctaatcctattcggaccattaacatcataagttgcgattggcatcctcttcctaggatcagattcactcaatcgaacatcataaactgcatcttcaatgtcacccatttcctatattttttcagattattggcttgcttcgttcgcaatattaggtactgtgattggacttctgttgatgccactaataatttgcagttgttgcggaatatgaactcaaggggagctcatggtgctatgaagttgattcggtgggaaattgttctacatccgcacttgctgctcaacctaaatacatgggttggatttcttcccaactttagtacataaagttctcaaattaatgttctactacattaaaattgaaatccgcaaacattttttagtacccaaacatttttctaatatacggtgaacatttttcatctactgattttttgatatatggtgaaaattggtgtaatatatgctggcatgtttttaaatactacatattgaccatgtagataaaaaatttatagtatatgatgaacatttttgtaatatagatggccatttttaaaatatacattgcacattttataatatacgatgagcagtttataatactagatgaaccttttttggagttctgaacatttttttgaaaacagcagccattgtacaagaaaaaaccaaaacaaaagaaatgagaaacccaaaaacaaaaacaaaacaaaacaaaacagagaaacctacagaaaaaaacgaaacagaaaaaggcaaaggaagaacccgaactgggccagccggctcggcgtgccccagtgggccgtcgtggcgaatgcaacggctacatgggccgctcttcgtgaaagagaaggaggtcagttcatggaccgctaccagtacacgggcctcgctgtggcaacacccgccgtgtactagttttcgcgggaatccaatgccaaaatcgctccccgcgggaacccgacgtcggtctggtgacttctggagccttccagaacactccacaagctcccagagccgtctgatcagatcagcacgaagcacgaacattggcgcgcgaagatattttccttcccgacgacgccacactgcatttcatttgaatttcaaaaatcgaaaacggaaaacactttctctcatcccgaggagaggcggttagtgccagaggagcacgagagaggccaccccccccccagccagctcacgtgccgtgccctcgcaccctgcgcggccgcatccgggccgtccgcgcggacagctggccgcgccccacccgaaccgacgcccaggatcgcgcccgccacccgcttgccttagcgtccacggctcctccggctatataacccgcccctcacccgctccccctccggcattccatttccgtcccaccaccgcaccaccaccactccaccaaaaccctagcgggcgagcgagggagagagagaccaccccgcccgaccccgccgatggagagatcccgccgcctgctgctggtggcgggcctgctcgccgcgctgctcccggcggcggcggccgccttcgggcagcagccgggggcgccgtgcgagcccacgctgctggcgacgcaggtggcgctcttctgcgcgcccgacatgcccaccgcgcagtgctgcgagcccgtcgtcgccgccgtcgacctcggcggcggggtcccctgcctctgccgcgtcgccgcggagccgcagctcgtcatggcgggcctcaacgccacccacctcctcacgctctacagctcctgcggcggcctccgtcccggcggcgcccacctcgccgccgcctgcgaaggtacgcgcacgttcaccgccctccgtccctccctctctctgtctacgtgcagattttctgtgctctctttcctgcttgcctagtacgtagtgttccatggcctctcgggccgctagcgctccgatttgcgttggtttccttgctgttctgccggatctgttggcacggcgcgcggcgtcgggttctcgccgtctcccgtggcgagcgacctgcgcagcgcgcgcggcctggctagcttcataccgctgtaccttgagatacacggagcgatttagggtctactctgagtatttcgtcatcgtaggatgcatgtgccgctcgcgattgtttcatcgatttgagatctgtgcttgttcccgcgagttaagatggatctagcgccgtacgcagatgcagagtctgttgctcgagttaccttatctaccgtcgttcgactatggtatttgcctgcttccttttggctgggtttatcgtgcagtagtagtagacatgtggacgcgttcttcttattttgtgccgaccatcgtcgagatacttttcctgctacagcgtttcatcgcctgcaccatcccgttcgtgatagcacttttgtgtcaaaccgcaacgcagctttgctttctgcggtatcttctgccttgtttgtcgccttgcttggtcaaaactgagaactcttgctgtttgatcgaccgagggcagaggcagagcaagagcctgccgtgcttttggctctgcagtgcgtcgtctctgcctcctttgccaaacatttccatgttgatcctctgggggcactgctttttcgcatgcggtttccgtagccttcctctttcatgaaaaaaggtttgggtcaaatcaaatggatcgcctattggcagagcagcagcagatagctggctgtctcacagctttggcagaatcggtctgttgcctgccaccgtgtctcttatcttgcctgccaccgtgtctcttttcttgttgcgcacgtcgtcacctcctcctacttcttttccagttttgtttacttttgatgaaatacggacgaacggctggtaatcattaactttggttgctgttgttactgtggattttggacgcaggacccgctcccccggccgccgtcgtcagcagccccccgcccccgccaccgtcgaccgcacctcgccgcaagcagccagcgcgtgcgtacctctccctctcgcccgcatctcgctccgtattaactgattgtgtctgcatactgacgtgtgctttggctttggatctgtttcgcagacgacgcaccaccgccgccgccgccgtccagcgacaagccgtcgtccccgccgccgtcccaggaacacgacggcgccgctccccacgccaaggccgcccccgcccaggcggctacctccccgctcgcgcccgctgctgccatcgccccgccgccccaggcgccacactccgccgcgcccacggcgtcatccaaggcggccttcttcttcgtcgccacggccatgctcggcctctacatcatcctctgagtcgccgaccccgaggccatggtccgtccagttgcagtagaatgctcgtcgtcttgttccgtttcatgcttgtcgccgttcgaggttcgtttctgcagtccgattgagaagaagacggtgggttttgatcgcgtcccgagatttctgttgtcgatcgtagcgtcctggtagtagtagtgtctggtagcagcagtatgttcatgtgtcctcggtcgcctagttttggtctcaagtagtactgtctgtccaccgtgtttgcgtggtcgcggagaacatcattgggttttgcgattcctctggtcagatgaaccactgctatgtgatcgatcgatatgatctgaatggaatggatcaagttttgcgttctgctgatgacgtgatgcttcttcagttatattcatgctcgatctatttctgtttcccccatttgaatttgtggagcagcagtttggctttcttttgttctgctatggatgaatgcttcttgcatgcatcttgtctttgcttaatttgaactgtagaacggatgcagttctggtttctgctaatgatgtgatgattcttcatatgcatatgctttacatgttcatctcttcaaatttgtgcagcaacagtttgtagctttcattcggctctgaatgaaatgcctcttgcatgttgtctttgcttaatttgtttttcacggggagcctgctgcagctttctgttgccatgttgttttccacgccaggacaaaatagatggtgcggtttgattcgatcccggttaattgcttgatgctagcttctgatcaatcccttcatcacgatgttccggagagccacatggaactggaggggggagattcaaattcatgcatgcaaatttgtgttggtgttgggtcacgtcaagcagtcactttttgcagtatcactcttaccattttatccttttgttgaaacctctctcctcaccccaaaagttgatgcaatagtgctatgcccacccatgcttttttcataatcttttgagcccaaagtcccattttactatctgtttgcatatttgtgttccttgcggcgagggctatcaagcaaggcctttcttgaatatattttggcaagttttcaaatttgaattctaaaagatggtgaaactctatgaaacaaatctcaaagtatatgaccttatcaccaatccaccattctacaaatatttcattctccggcatcgcctgcttccgacggcgatgccgctgtaggtcctcgccgccgccgcaactcttccgctagctatgtggtggaactgttggcactccaccctcatttcccgtctctttctatcgtctctaaccaccgcacaacgttccctacgtggggaggagcaacaatatctgcttcaactctttggagggtaaattgcatggatttcattcacaaagaaaatattgcatggattttaagtcaatttttgtggctgtggatcaatcaaccaaacaatttgggagaaaaaattcagcttagaatctgtatgagtgtggttgtgtttgtgtgacccttgcgtgaggaacagcagggacgccaaggagggttgccatggacgcaacaagcagaggagccgacgggcctctgaggaatgctgtcgcggacggcgggggagagtagcggggagggagcgcccagtgcttccacaagcaggagagttgcgacagcgtcgatgacgaacggacggagcactcataattagaagagtgtggcgctagagaaaaaggacaaggggatttgcatctaattgctttgagattcgttttgtcacgtgtcacccgctggagaaggtctcacgaccggaggcgtgcgacccgggtcatataggaatttttttcgtgccatcgataacaaccgaaattcttcgtgccgttgaaatcttgaatagatctgaatcagcagaagttactttaaccccaccgtcgtaaaaagaaaggcagaaatcgacgaactcaaggaggatgggaaccaaagaca

SEQ ID NO: 186 - DNA, 663 bp, Triticum aestivum
  source 1..663: mol_type = unassigned DNA
atggagagatcccgcgggctgctgctggtggcggggctgctggcggcgctgctgccggcggcggcggcgcagccgggggcgccgtgcgagcccgcgctgctggcgacgcaggtggcgctcttctgcgcgcccgacatgccgacggcccagtgctgcgagcccgtcgtcgccgccgtcgacctcggcggcggggtgccctgcctctgccgcgtcgccgccgagccgcagctcgtcatggcgggcctcaacgccacccacctcctcacgctctacagctcctgcggcggcctccgccccggcggcgcccacctcgccgccgcctgcgaaggacccgctcccccggccgccgtcgtcagcagccccccgcccccgcctccaccgtccgccgcacctcgccgcaagcagccagcgcacgacgcaccaccgccgccaccgccgtcgagcgagaagccgtcgtccccgccgccgtcccaggaccacgacggcgccgccccccgcgccaaggccgcgcccgcccaggcggccacctccacgctcgcgcccgccgccgccgccaccgccccgccgccccaggcgccgcactccgccgcgcccacggcgccgtccaaggcggccttcttcttcgtcgccacggccatgctcggcctctacatcatcctctga

SEQ ID NO: 187 - protein, 220 aa, Triticum aestivum
MERSRGLLLVAGLLAALLPAAAAQPGAPCEPALLATQVALFCAPDMPTAQCCEPVVAAVDLGGGVPCLCRVAAEPQLVMAGLNATHLLTLYSSCGGLRPGGAHLAAACEGPAPPAAVVSSPPPPPPPSAAPRRKQPAHDAPPPPPPSSEKPSSPPPSQDHDGAAPRAKAAPAQAATSTLAPAAAATAPPPQAPHSAAPTAPSKAAFFFVATAMLGLYIIL

SEQ ID NO: 188 - DNA, 3810 bp, Triticum aestivum
  source 1..3810: mol_type = unassigned DNA
aacatatttataataaatggtgaacattttttttaataattgatgaccatttttaaaatgcatattgaacattttataatatacactgtacagttttataataatcgacgaacatcttttggagttctgaacatttttttcaaaaacacaagccattttccaggaagaatacaaatgcaaaagaaatgagatatccaaaaagcaaaaaagaaaaacaaaacaaaacagagaaacctacaggaaaatccaaacagaaaaggcaaagaaagaacccgaactgggccaggcaatgtttccaacggcctcgctcttcctgaacaagaaggccagtcagcccatgggctgctcccagtactcgggccccgctgtggcagcacgccatgtaatagttttcgcgggaatccaacgccgaaatcgcccgcagcgggaacccgacgtcggtctggtgcgttctggcgccttccagaactctccacaggctcccgcagccgtccgatcagatcagcacgaagcacgaacattggcgcgcggcgatattttctttcctcgcccgacgacggccgcactgcatttcattttgaatttcaaaattcggaaacggaaaagctttctcgcatcccgaggcgaggcggttacgggcgccagaggggccaccccacccacccacccccgccctcacgtgccccgcgcggccgcatccgggccgtccgcgcggacagctggccgcgcccagcccgaaccgacgcccaggatcgagcgagggcggcgcgcccggggcttggcttagcgtccacgccacctccggctatataagccgccccacacccgctccccctccggcattccattccgccaccgcaccaccaccaccaccaaaccctagcgagcgagcgagggagagagagaccgccccgccgcgacgatggagagatcccgcgggctgctgctggtggcggggctgctggcggcgctgctgccggcggcggcggcgcagccgggggcgccgtgcgagcccgcgctgctggcgacgcaggtggcgctcttctgcgcgcccgacatgccgacggcccagtgctgcgagcccgtcgtcgccgccgtcgacctcggcggcggggtgccctgcctctgccgcgtcgccgccgagccgcagctcgtcatggcgggcctcaacgccacccacctcctcacgctctacagctcctgcggcggcctccgccccggcggcgcccacctcgccgccgcctgcgaaggtacgttgtccgcctcctcccctccctccctccctccctctctctctacgtgctcgctttcctgcttacctagtagtacgtagtttcccatgccttcttgactcgctagaagtgctccggtttgggtctgttaatttcctcgctgtactaccggatctgtcgtcggcacggcgcgcggcgtcgggtcctcgccttctcccgtggcgaccgacctgcgcagcgcgcgcgcggcctagctagcttcataccgctgtacctcgacatacacggagcgatctatggtctactctgagtatttcctcatcgtagaacgcatgcgccgctcgcgattgtttcgtcgattctagatccgtgcttgttcccgcgagttagtatgcatctgcgtgcatatgccgtacgcacgcagatgcagagtctgttgctcgagttatctactgtcgttcgctcgaccatatttgcctgttaatttcctgttcatcgtgcatgcagtagtagtagccatgtccacgccttcttgttttgaggcgatcatcgtcgagatccatggctttgctttctgcactatcttctgccttgttttgttctccgcagtacgtacgtcttgcttggtcaaaactgaaaaacgctttgctgtttgtttgatcggcaagagctggccgtgcttttggcaccgcagtgcgtcgcctctgccgcttttgcgaaacatttccatgttgatcctctggcggaactactttttcgcgtgcggtttgcgtggccttcctctctcgtgaaaagaggtcgggtcaaaccaaatggatcgcctcttggcagagcagcggcagcagatagctggccgtctcgcagctttggcagaaccggtctgtggccatctgtcgccgcctgccaccgtttccctgatgtttgtttctctctcgcctgccactgtttcttttcttgttgcgcacgtacgtcgtcacctcctcctacttttttgccagttttgtttacttttgatgaaatatacggatgaatcggctggtgattaactttggctgctgctgttaattactgtggattttggatgcaggacccgctcccccggccgccgtcgtcagcagccccccgcccccgcctccaccgtccgccgcacctcgccgcaagcagccagcgcgtaagaacctctccctctccctctctctctccctctcgcctgcatctcgctatgtttatccatgtccatatgttgatcagccttgtttagttactaacatgtgcaccggatcgggttctcgcagacgacgcaccaccgccgccaccgccgtcgagcgagaagccgtcgtccccgccgccgtcccaggaccacgacggcgccgccccccgcgccaaggccgcgcccgcccaggcggccacctccacgctcgcgcccgccgccgccgccaccgccccgccgccccaggcgccgcactccgccgcgcccacggcgccgtccaaggcggccttcttcttcgtcgccacggccatgctcggcctctacatcatcctctgagtcgcgcgccgaccccgcgagagaccgtggtccgtccagtcgcagtagagtagagcgctcgtcgtctcgttccgtttcgtgcctgtcgccgttcgaggttcgtttctgcgtgcagtccggtcgaagaagccggtgggttttgagtactagtggtagtagtagcagcagctatcgtttctgtccgctcgtacgtgtttgcgtggtcgcggagaacaattaattgggtgtttgcgagtcctctggttaagatgaaccactgatgctatgtgatcgatcgatcggtatgatctgaatggaaatggatcaagttttgcgttctgctgatgatgtgatccatttggatctgtgtggggcaacagtttcgcttgcttttgctctgcgatgaacgaatgcttcttgcatgcatcttgtctttgcttaatttgaactgtagaacggatgcagtactgatttctgcttatgatgtgacgattcgtcgtacgcatatcatctcttcaaatttgtgtagcagctgtttgtagcttccattctgctatggacgaatgcctgtttttcacggagaaccgcgcgcggggaccgatgcggctttgtgttgccatgttgttttccacgccaggacaaaatagatggtgcggttttgatccccaatcccaccatcaccatgttccggagagccacatggaactcacgtcaagcggtcactttttgcagaatcactcttaccattttacccttttgttgaaacctctctcctcatccccaaaagttgatgcaacagtgctatgcgcgcccacccatgctttttcatatgattgtaaaatttggatcgattttatcttttgaaccctaagtccggtttacaatctgtttgcatgtttatgttccttgcggcgaggaccattaaacaagactactattggatatatttcgacaggctttgaaatccgaattctaaaacatggtgagactctatgagacacaagaatgctctttagaacacgaggaaacctaattaagattgataagaacaga

SEQ ID NO: 189 - DNA, 672 bp, Triticum aestivum
  source 1..672: mol_type = unassigned DNA
atggagagatcccgcggcctgctgctggcggcgggcctgctggcggcgctgctgccggcggcggcggccgcgttcgggcagcagccgggggcgccgtgcgagcccacgctgctggcgacgcaggtggcgctcttctgcgcgcccgacatgcccacggcccagtgctgcgagcccgtcgtcgccgccgtcgacctcggcggcggggtgccctgcctctgccgcgtcgccgcggagccgcagctcgtcatggcgggcctcaacgccacccacctcctcacgctctacggctcctgcggcggcctccgtcccggcggcgcccacctcgccgccgcctgcgaaggacccgctcccccggccgccatcgtcagcagccccccgcccccgccaccaccgtccgccgcacctcgccgcaagcagccagcgcacgacgcaccgccgccgccgccgccgtctagcgagaagccgtcgtccccgccgccgtcccaggagcacgacggcgccgccccccgcgccaaggccgcgcccgcccaggcgaccacctccccgctcgcgcccgctgccgccatcgccccgccgccccaggcgccacactccgcggcgcccacggcgtcgtccaaggcggccttcttcttcgtcgccacggccatgctcggcctctacatcatcctctga

SEQ ID NO: 190 - protein, 223 aa, Triticum aestivum
MERSRGLLLAAGLLAALLPAAAAAFGQQPGAPCEPTLLATQVALFCAPDMPTAQCCEPVVAAVDLGGGVPCLCRVAAEPQLVMAGLNATHLLTLYGSCGGLRPGGAHLAAACEGPAPPAAIVSSPPPPPPPSAAPRRKQPAHDAPPPPPPSSEKPSSPPPSQEHDGAAPRAKAAPAQATTSPLAPAAAIAPPPQAPHSAAPTASSKAAFFFVATAMLGLYIIL

SEQ ID NO: 191 - DNA, 5895 bp, Triticum aestivum
  source 1..5895: mol_type = unassigned DNA
ccaaacaacagagtccactgtctccaagagcaccgggaaggaagcagcaagacggtgccaatcttccaactctacaggggacaacaccctatggaaacccaaatcccaattcctaccagagagctccgtgatggagatccctggatctgagcaataagaaaacaagtttggaaaagagcccgagagaggcccctctccaacccaccaatccaaccgaaagcaaacaaaacgaccatctcccaccacgaacttaactagagacctgaaatcatcatgaacatgaatcagctggcgcaagaaccgggagcccccagatccagaggcaaacaatgggttgccagtggggaaatatttagctttcaggatatcccaccatagggtcctcgcactagttctttactatactcaagccaactataagacttaaaccatttagctacaaatatcgatgcacacctcccgtggggtgttgcggaaaagcatgtttttttggtcgacaagcccctttcacaatgtatcctcttctaattctattcagatcattaacatcagctgtgattgacatcctcttcccaagatcagattcacgcaattgaacatcataaaccacatcttcaatgtcatcctcttcctatatatttttagatgattagcttgcttcgttctcaatatcaggttctatgaatggacttgagttgatgccactaataatttgtagttgttgcaaaatgtgaactgaaggggagctatgaatgaacttgagttgatttgatgggaaattgttctacacatgcacttgctgctcaacttaaatacgtgccttggatttcttcccaactttagtacataaagttctccaagtaatgttctactacataaaatttgaaatctgcaaacattttttagtacacgaacatttttctatatacagtgaacatttttcatctactgattttattttaatatatggtgaaaattggtgtaatatatgctgacatgtttttaagtacatattgaacatatatataaaatacatgatgaacatttttgttatatatgatgctcattttttcaatacatattgaacattttatattatacgatggacagttttataataatcaatgaacaacttttggagttctgaacatgcttttgaaaacacaagacattttccaataaaaaacaaaacaaaagaaatgagaaacccaaaaacaaaaacaaaacaaaacagagaaacctacagaaaaaacgaaacagagaaggcaaagaaagaaccggaactgggccagccaactcggcgtgccccagtggtccgtcgtggcgaatgtttgcaacggctacatgggccgctcctcgtgaaaaagaagaaggtcagtccatgggctgctaccagtacacgggcctcgctgtggcaaactggcaacacgccatattagttttcgcgggaatccaatgccgaaaaccacccaccgcgggaacccgacgtcggtctggtgacttctggcgccttccagaaccctccacaagctcccagagccgtctgatcagatcagcacgaagcacgaagcacgaacattggcgcgcgaagatattttctttccccagcctccgcctcgcccgacgacgccgcactgcatttcatttgaatttcaaaaatcgaaaacggaaaaactttctcgcatcccgaggagaggcggttacgcgcgccagaggagcacgagagaggccaccccacgcacccagccagctcacgtgccgccctcgcaccccccgcggccgcatccgggccgtccgatcgcacagctggccgcgctccacccgaaccgacgcccaggatcgcgcccgccacccgcttgccttcgcgtccacggctcctccggctatataacccgccccccacccgctccccctccggcattccaccccaacaccgcatcaccaccaccactccaccaaaccctagcgaccgagcgagagagggagagaccgccccgccgatggagagatcccgcggcctgctgctggcggcgggcctgctggcggcgctgctgccggcggcggcggccgcgttcgggcagcagccgggggcgccgtgcgagcccacgctgctggcgacgcaggtggcgctcttctgcgcgcccgacatgcccacggcccagtgctgcgagcccgtcgtcgccgccgtcgacctcggcggcggggtgccctgcctctgccgcgtcgccgcggagccgcagctcgtcatggcgggcctcaacgccacccacctcctcacgctctacggctcctgcggcggcctccgtcccggcggcgcccacctcgccgccgcctgcgaaggtacgtcgcgcacgttcaccgcctccctccctccctcgctctctctctctctctctctctctctctctacgtgccgattctctgtgttcgcttccctgcttacctagcacgtagttttccatggcttctcgactcgctggtcctccgatttgggtcggttaatttcctcgctgtactaccggatctgtcggcacggcgcgcggcgtcgggttctcgccgtctcccgtggcgagcgacctgcgcagcgcgcgcgcggcctagctagcttcataccgctgtaccttcagatacacggagcgatttagggtctactctgagtatttcgtcatcgtaggatgcatgtggcagtcgcgattgtttcatcgattttagatctgtgcttgttcccgcgagttaagatggatctagcgccgtacgcagacgcagatggtcttgctgtctctgttgctcgagttatcttatctactgtcgttcgagtatatttgcctgcttccttttgatctgtgtttatcgtgcagtagcagtagccatgtccacgccttcttgtttcgaggcgatcatcgtcgagatagcgctttgtttcaaaccgcaacgcagcctttgctttctgcggtatcttctgccttgtttttgttctgtgcagtacgtcttgcttggtcaaaagtaaaaactcttgctgttcgatcgaccgaggcctgatgcagagcaagagctggccgtgcttttcgctctgcagtgcatcgcctctgcctctttggccaaacatttccatgttgatcctctggtgtggtactacttttttgcatgcggtttgcgtagccttcctctttcgtgaaaaaaggtcgggtcgcctattggcagagcagcagcagcagcaacagatagctggctgtctcgcagctttgacagaaccggtctgtggccatctgtcgccgcctgccaccgtttccctgatgtttgtttctctcgtctcatctcgcctgccactgtttcttttcttgttgcgcacgtcgtcacctcctcctacttttttttccagttttgtttacttttgagatacggacgaacggctggtaattactaactttggttgctgttgttactgtggattttggacgcaggacccgctcccccggccgccatcgtcagcagccccccgcccccgccaccaccgtccgccgcacctcgccgcaagcagccagcgcgtacgaacctctccctccctctctctcgcctgcatctcgctctgtattagctgattgtgtttacttactgacgtgtgctttggctttggatctgtttcgcagacgacgcaccgccgccgccgccgccgtctagcgagaagccgtcgtccccgccgccgtcccaggagcacgacggcgccgccccccgcgccaaggccgcgcccgcccaggcgaccacctccccgctcgcgcccgctgccgccatcgccccgccgccccaggcgccacactccgcggcgcccacggcgtcgtccaaggcggccttcttcttcgtcgccacggccatgctcggcctctacatcatcctctgagtggccgaccccgcaagaccatgtccgtccagttgcagtagagtagagtgctcgtcgtcttgttccgtttcatgcttgtcgccgttcgaggttcgtctctgcatgcagtccgatcgaagaagacggtggattttgagtagtagctgtcgttggcaggagtatggagttcatgtgtcctcggtcgcctagttttggtctcaagtagtgtctgtctgtccgccgtgtttgcgtggtcgcggagaagtacaattggtgggtgtttgcgattcctctggttagatgaaccactgctatgtgatcgatcgatatgatctgaatggaatggatcaagttttgcgttccgctgatgatgatgtgatatgcttcttcatgtatatatattcatgctcgatctatttgtgtttctccgatttgaatctgtgttaagcaacagtttgtcttgcttctgttctgcagcttctgctatggatggatgcttcttgcatgcatcttgtctttgcttaatttgtagtagaacggatgcagttttgatctctgctgatgatgtgatgattcttcatatgcatatgctctgtacatgtctcttcaaatttgtgtagcaacagtctgtagttctcgttctgctctgaatgaatgcctcttgcatgttgtctttgctagctttgtggtagaaatgtagaatgcagacattgcttccgtcccaaataatctgttccttgcttcgtatatatattgacatgttgtgcatataatctgtgaatgaagttgtgaacaagtcttctttcagaaaaaaaagttgtgaacaagtgcctcacctcacctacaaggctacaaacacaacaacaacagaagctggcctcttcacggagaaccgcgcggggactgctgcagctttctgttgccatattgtttttcacgccaggacaaaatagacggtgcggtttgattcgatcccggttaattctcaatcccttcgtcactatgttccacatggaaccggagggggtagattcacattcgtgcatgcaaaatttattggtattgctcgatccatcaactcgtgtaccgtcaactgggtcacgttttgccataaaagtcttaccattttaccctagcgctatgcccacccatgctttttcatatgattctgaagttttaaatctattttatctttgaggcactaggtggtgcggtttgatttgatcccggttaattctcaatcaaattttattggtgttgctctagtgggggagcttgagcaaaatttaagagggggccatgactcaaggggaacaaattagtaggcctttaggggctactcacttgttgaaatactaattaggcctaaaagctagcacgctttttaatgaatgccaaaattaggagggggggggggggggggcatgccccccttggtctacactaaactccgccagtgtatcgccgtcatttgggtcatgtcaagcagccactttttgccataacactcttaccattttacccttttgttgaaacctctctcctcactccaaaagtacctgacgagtaatgctacgcccacccatgcattttcatagtatgattttaaagttttaaatctatcttatcttttgaattgaaagtctgatttacaatctgtttgcatatttatgttccttgcggcaaggactttcaaacaaaagacctttcttgaatatatttcgacaagttttaaaatttgatttctaaaacatggtgaaacgctatcaaacatatatagtgatgctctcccgaacaagaaaaaaaatctactaataaaacttgataagaacacacattaataacttgataaaaacattttagattcgtacgaagactgcttaaagtgtcattgtttaccaagttccacatgcattgatcgatttgattagttggaactgtcgaggttgggtcaaccacgaatagttcaagaacttgtgtgtctctctaaggcgcatcgtcccaatattatctatctttct

SEQ ID NO: 192 - DNA, 1665 bp, Triticum aestivum
  source 1..1665: mol_type = unassigned DNA
atgagcagccccatggaggaagctcaccatggcatgccgtcgacgacgacggcgttcttcccgctggcagggctccacaagttcatggccatcttcctcgtgttcctctcgtggatcttggtccactggtggagcctgaggaagcagaaggggccgaggtcatggccggtcatcggcgcgacgctggagcagctgaggaactactaccggatgcacgactggctcgtggagtacctgtccaagcaccggacggtcaccgtcgacatgcccttcacctcctacacctacatcgccgacccggtgaacgtcgagcatgtgctcaagaccaacttcaacaattaccccaagggggaggtgtacaggtcctacatggacgtgctgctcggcgacggcatcttcaacgccgacggcgagctctggaggaagcagaggaagacggcgagcttcgagttcgcttccaagaacctgagagactttagcacgatcgtgttcagggagtactccctgaagctgcgcagcatcctgagccaggcttgcaaggccggcaaagtcgtggacatgcaggagctgtacatgaggatgacgctggactcgatctgcaaggtggggttcggggtcgagatcggcacgctgtcgccggagctgccggagaacagcttcgcgcaggcgttcgacgccgccaacatcatcgtgacgctgcggttcatcgacccgctgtggcgcgtgaagaagttcctgcacgtcggctcggaggcgctgctggagcagagcatcaagctcgtcgacgagttcacctacagcgtcatccgccggcgcaaggccgagatcgtgcaggcccgggccagcggcaagcaggagaagatcaagcacgacatactgtcgcggttcatcgagctgggcgaggccggcggggacgacggcggcagcctgttcggggacgacaagggcctccgcgacgtggtgctcaacttcgtgatcgccgggcgggacaccacggccacgacgctctcctggttcacctacatggccatgacgcacccggccgtggccgagaagctccgccgcgagctggccgccttcgaggcggaccgcgcccgcgaggatggcgtcgcgctggtcccctgcagcgactcagacggcgacggctccgacgaggccttcgccgcccgcgtggcgcagttcgcggggctgctgagctacgacgggctcgggaagctggtgtacctccacgcgtgcgtgacggagacgctgcgcctgtacccggcggtgccgcaggaccccaagggcatcgcggaggacgacgtgctcccggacggcaccaaggtgcgcgccggcgggatggtgacgtacgtgccctactccatggggcggatggagtacaactggggccccgacgccgccagcttccggccggagcggtggatcggcgacgacggcgcgttccgcaacgcgtcgccgttcaagttcacggcgttccaggcggggccgcggatctgcctcggcaaggactcggcgtacctgcagatgaagatggcgctggccatcctgtgcaggttcttcaggttcgagctcgtggagggccaccccgtcaagtaccgcatgatgaccatcctctccatggcgcacggcctcaaggtccgcgtctccagggcgccgctcgcctga

SEQ ID NO: 193 - protein, 554 aa, Triticum aestivum
MSSPMEEAHHGMPSTTTAFFPLAGLHKFMAIFLVFLSWILVHWWSLRKQKGPRSWPVIGATLEQLRNYYRMHDWLVEYLSKHRTVTVDMPFTSYTYIADPVNVEHVLKTNFNNYPKGEVYRSYMDVLLGDGIFNADGELWRKQRKTASFEFASKNLRDFSTIVFREYSLKLRSILSQACKAGKVVDMQELYMRMTLDSICKVGFGVEIGTLSPELPENSFAQAFDAANIIVTLRFIDPLWRVKKFLHVGSEALLEQSIKLVDEFTYSVIRRRKAEIVQARASGKQEKIKHDILSRFIELGEAGGDDGGSLFGDDKGLRDVVLNFVIAGRDTTATTLSWFTYMAMTHPAVAEKLRRELAAFEADRAREDGVALVPCSDSDGDGSDEAFAARVAQFAGLLSYDGLGKLVYLHACVTETLRLYPAVPQDPKGIAEDDVLPDGTKVRAGGMVTYVPYSMGRMEYNWGPDAASFRPERWIGDDGAFRNASPFKFTAFQAGPRICLGKDSAYLQMKMALAILCRFFRFELVEGHPVKYRMMTILSMAHGLKVRVSRAPLA

SEQ ID NO: 194 - DNA, 3645 bp, Triticum aestivum
  source 1..3645: mol_type = unassigned DNA
tctcatctgtggaacatatttatttggcagcactagatgcctcggcatattgcaaggtttttaatatttgcgatcttttctgtttcaagcttctaataaatagaaggtgaccactttcatcaaaattttcttctgtttagcttctgctacaaatttctaataaatatagaagggggaactttcagcaagattttttatatttgtgattttcaggctttttccatttagggagaacatcagagcaccccttgacagttgacaccccttcattcgaaatttctcaacttgttctgctttgacttcaaaaactgtttcactgaaagatgcactttgtattggttagtgcgggttcaataaagaccagatggaccataaccatggctccatggctccaactgtgaagatgacataatcacaacgctaactgtcatcaaacgcatcacctacatcccccgcaaaacgaaataaaaatgcatcagtgcatcacctacatttatagtaaaacagaaggaaaatgcagaatccatgacctagcttagcaccaagcacatactaacatacctagttatgcatataaaaatgagtgttttcttggtcagcagatcacaaaaaggacacaaacggtaggttccatctagtcagggggttaggttagggacgccatgtggatgaggcaatcttaattctcggccacaccaagattgtttggtgctcggcgccactaatgcccaatatattacctaaccgagccatccaaatgctacatagaattaatcctcctgtagactgaacccacttgatgagcagccccatggaggaagctcaccatggcatgccgtcgacgacgacggcgttcttcccgctggcagggctccacaagttcatggccatcttcctcgtgttcctctcgtggatcttggtccactggtggagcctgaggaagcagaaggggccgaggtcatggccggtcatcggcgcgacgctggagcagctgaggaactactaccggatgcacgactggctcgtggagtacctgtccaagcaccggacggtcaccgtcgacatgcccttcacctcctacacctacatcgccgacccggtgaacgtcgagcatgtgctcaagaccaacttcaacaattaccccaaggtgaaactgaaagaacccctcagccttgtgaatttttttgccaaggttcagaagtttacactgacacaaatgtctgaaattgtacgtgtagggggaggtgtacaggtcctacatggacgtgctgctcggcgacggcatcttcaacgccgacggcgagctctggaggaagcagaggaagacggcgagcttcgagttcgcttccaagaacctgagagactttagcacgatcgtgttcagggagtactccctgaagctgcgcagcatcctgagccaggcttgcaaggccggcaaagtcgtggacatgcaggtaaccgaactcagtcccttggtcatctgaacattgatttcttggacaaaatttcaagattctgacgcgagcgagcgaattcaggagctgtacatgaggatgacgctggactcgatctgcaaggtggggttcggggtcgagatcggcacgctgtcgccggagctgccggagaacagcttcgcgcaggcgttcgacgccgccaacatcatcgtgacgctgcggttcatcgacccgctgtggcgcgtgaagaagttcctgcacgtcggctcggaggcgctgctggagcagagcatcaagctcgtcgacgagttcacctacagcgtcatccgccggcgcaaggccgagatcgtgcaggcccgggccagcggcaagcaggagaaggtgcgtacgtgatcgtcgtcgtcaagctccggatcgctggtttgtgtaggtgccattgatcactgacacactagctgggtgcgcagatcaagcacgacatactgtcgcggttcatcgagctgggcgaggccggcggggacgacggcggcagcctgttcggggacgacaagggcctccgcgacgtggtgctcaacttcgtgatcgccgggcgggacaccacggccacgacgctctcctggttcacctacatggccatgacgcacccggccgtggccgagaagctccgccgcgagctggccgccttcgaggcggaccgcgcccgcgaggatggcgtcgcgctggtcccctgcagcgactcagacggcgacggctccgacgaggccttcgccgcccgcgtggcgcagttcgcggggctgctgagctacgacgggctcgggaagctggtgtacctccacgcgtgcgtgacggagacgctgcgcctgtacccggcggtgccgcaggaccccaagggcatcgcggaggacgacgtgctcccggacggcaccaaggtgcgcgccggcgggatggtgacgtacgtgccctactccatggggcggatggagtacaactggggccccgacgccgccagcttccggccggagcggtggatcggcgacgacggcgcgttccgcaacgcgtcgccgttcaagttcacggcgttccaggcggggccgcggatctgcctcggcaaggactcggcgtacctgcagatgaagatggcgctggccatcctgtgcaggttcttcaggttcgagctcgtggagggccaccccgtcaagtaccgcatgatgaccatcctctccatggcgcacggcctcaaggtccgcgtctccagggcgccgctcgcctgatcttgacctggttccggcgacggtgatggacgctccggtggctggctggccggacggccggcgcgttatgacaggctcgatttagcttggcaactgtgataaactcgtatatgtaggcagagtggagagggtgttgatcgattcgccatggacgttgctcgtccgttgttaccatcgtaccatgtttgtattgcttctagatcactttatagttcgtgtttgttcttgagcctaagtatttattgcacatttcaaaagtgacaaatgtatgcaattgtctttttggggtgttttctaagggtagtattttcgtagatttattttgtcgaccaaaccctggccgtcacacatgattcgatccctcttgccgccgccagcgtgcgacaccagcgcggggggggggggggggggggggggggggggggggggggggggggggggctagggtgctacaccggcgggcgccgctgttgcttgtggggagtccagtatggaggagggcgacgacgatgagtggtcggattacaactgtcgacagctgatgctcgttggcggcactagtgaagccgacattggtcggaggttcacatatccagtgggaaggtcatcaacggcagcctggcttggcccggacatcggagaagagggcgtcgatgtatggtcctggatggcgacaagcttgatatcaaactcggccctatcatgcagcggcatgttttcttcttcttcttcaggtttactttaggaagtcccagtttaggagtaatgttttcccagttttattggtgtgtttatcgtcggcggaggacatgtggaactgtgtcttcgattttcttttaggatctacccggcttacatttttcgctggatccatttggattctttcgactttcatagtctacagagtttctacatgtcct

SEQ ID NO: 195 - DNA, 1656 bp, Triticum aestivum
  source 1..1656: mol_type = unassigned DNA
atgagcagccccatggaggaagctcaccttggcatgccgtcgacgacggccttcttcccgctggcagggctccacaagttcatggccgtcttcctcgtgttcctctcgtggatcctggtccactggtggagcctgaggaagcagaaggggccacggtcatggccggtcatcggcgcgacgctggagcagctgaggaactactaccggatgcacgactggctcgtggagtacctgtccaagcaccggacggtcaccgtcgacatgcccttcacctcctacacctacatcgccgacccggtgaacgtcgagcacgtgctcaagaccaacttcaacaattaccccaagggggaggtgtacaggtcctacatggacgtgctgctcggcgacggcatattcaacgccgacggcgagctctggaggaagcagaggaagacggcgagcttcgagttcgcttccaagaacttgagagacttcagcacgatcgtgttcagggagtactccctgaagctgtccagcatcctgagccaggcttgcaaggcaggcaaagttgtggacatgcaggagctgtacatgaggatgacgctggactcgatctgcaaggtggggttcggggtggagatcggcacgctgtcgccggagctgccggagaacagcttcgcgcaggccttcgacgccgccaacatcatcgtgacgctgcggttcatcgacccgctgtggcgcgtgaagaaattcctgcacgtcggctcggaggcgctgctggagcagagcatcaagctcgtcgacgagttcacctacagcgtcatccgccggcgcaaggccgagatcgtgcaagcccgggccagcggcaagcaggagaagatcaagcacgacatactgtcgcggttcatcgagctgggcgaggccggcggcgacgacggcggcagcctgttcggggacgacaagggcctccgcgacgtggtgctcaacttcgtcatcgccgggcgggacacgacggccacgacgctctcctggttcacctacatggccatgacgcacccggccgtggccgagaagctccgccgcgagctggccgccttcgagtccgagcgcgcccgcgaggatggcgtcgctctggtcccctgcagcgacggcgagggctccgacgaggccttcgccgcccgcgtggcgcagttcgcgggactcctgagctacgacgggctcgggaagctggtgtacctccacgcgtgcgtgacggagacgctccgcctgtacccggcggtgccgcaggaccccaagggcatcgcggaggacgacgtgctcccggacggcaccaaggtgcgcgccggcgggatggtgacgtacgtgccctactccatggggcggatggagtacaactggggccccgacgccgccagcttccggccagagcggtggatcggcgacgacggcgccttccgcaacgcgtcgccgttcaagttcacggcgttccaggcggggccgcggatctgcctgggcaaggactcggcgtacctgcagatgaagatggcgctggccatcctgtgcaggttcttcaggttcgagctcgtggagggccaccccgtcaagtaccgcatgatgaccatcctctccatggcgcacggcctcaaggtccgcgtctccagggtgccgctcgcctga

SEQ ID NO: 196 - protein, 551 aa, Triticum aestivum
MSSPMEEAHLGMPSTTAFFPLAGLHKFMAVFLVFLSWILVHWWSLRKQKGPRSWPVIGATLEQLRNYYRMHDWLVEYLSKHRTVTVDMPFTSYTYIADPVNVEHVLKTNFNNYPKGEVYRSYMDVLLGDGIFNADGELWRKQRKTASFEFASKNLRDFSTIVFREYSLKLSSILSQACKAGKVVDMQELYMRMTLDSICKVGFGVEIGTLSPELPENSFAQAFDAANIIVTLRFIDPLWRVKKFLHVGSEALLEQSIKLVDEFTYSVIRRRKAEIVQARASGKQEKIKHDILSRFIELGEAGGDDGGSLFGDDKGLRDVVLNFVIAGRDTTATTLSWFTYMAMTHPAVAEKLRRELAAFESERAREDGVALVPCSDGEGSDEAFAARVAQFAGLLSYDGLGKLVYLHACVTETLRLYPAVPQDPKGIAEDDVLPDGTKVRAGGMVTYVPYSMGRMEYNWGPDAASFRPERWIGDDGAFRNASPFKFTAFQAGPRICLGKDSAYLQMKMALAILCRFFRFELVEGHPVKYRMMTILSMAHGLKVRVSRVPLA

SEQ ID NO: 197 - DNA, 3416 bp, Triticum aestivum
  source 1..3416: mol_type = unassigned DNA
gcgggagctacatgcaccgggctgccctttagcttctgctaaaaatttctagcaagtatagaagggcggaactttcaacaaagatatgagaacatcagagcactccttgacaccccttcattccaaatttctcaacttgctctgctttgacttcaaaaactgtctcactgaaagatgcactttgtattggttagtgcgggttcattaaagatcagacggaccataaccatggttccaactgtgaagatgagaccatcacaatgctaactgtcatcaaatgcatcacctacattccctgcaaaataaaaataaaaatgcacgacctacatgtgcagtaaaacagaaggaaaatgcagaatccatgacctagctcagcatcaagcacatacaaacatatctagttatatgcatataaaaatcagtattttcttggtcagcagatcacaaaaaggacacaaacggtaggttccatctagtcagggggttaggttagggacaccatgtggatgaggcaatcttaattctcggccacaccaagattgtttggtgctcggcagcactaatgcccaatatattacctaaccgagccatccaaatgctacatagagttaatcctcctgtagacctgaacccccttcatgagcagccccatggaggaagctcaccttggcatgccgtcgacgacggccttcttcccgctggcagggctccacaagttcatggccgtcttcctcgtgttcctctcgtggatcctggtccactggtggagcctgaggaagcagaaggggccacggtcatggccggtcatcggcgcgacgctggagcagctgaggaactactaccggatgcacgactggctcgtggagtacctgtccaagcaccggacggtcaccgtcgacatgcccttcacctcctacacctacatcgccgacccggtgaacgtcgagcacgtgctcaagaccaacttcaacaattaccccaaggtgaaacaatcctcgagatgtcagtcaaggttcagtataatcggtactgacagtgttacaaatgtctgaaatctggaattgtgtgtgtagggggaggtgtacaggtcctacatggacgtgctgctcggcgacggcatattcaacgccgacggcgagctctggaggaagcagaggaagacggcgagcttcgagttcgcttccaagaacttgagagacttcagcacgatcgtgttcagggagtactccctgaagctgtccagcatcctgagccaggcttgcaaggcaggcaaagttgtggacatgcaggtaactgaactctttcccttggtcatatgaacgttgatttcttggacaaaatctcaagattctgacgcgagcgagccaattcaggagctgtacatgaggatgacgctggactcgatctgcaaggtggggttcggggtggagatcggcacgctgtcgccggagctgccggagaacagcttcgcgcaggccttcgacgccgccaacatcatcgtgacgctgcggttcatcgacccgctgtggcgcgtgaagaaattcctgcacgtcggctcggaggcgctgctggagcagagcatcaagctcgtcgacgagttcacctacagcgtcatccgccggcgcaaggccgagatcgtgcaagcccgggccagcggcaagcaggagaaggtgcgtacgtggtcatcgtcattcgtcaagctcccgatcgctggtttgtgcagatgccactgatcactgacacattaactgggcgcgcagatcaagcacgacatactgtcgcggttcatcgagctgggcgaggccggcggcgacgacggcggcagcctgttcggggacgacaagggcctccgcgacgtggtgctcaacttcgtcatcgccgggcgggacacgacggccacgacgctctcctggttcacctacatggccatgacgcacccggccgtggccgagaagctccgccgcgagctggccgccttcgagtccgagcgcgcccgcgaggatggcgtcgctctggtcccctgcagcgacggcgagggctccgacgaggccttcgccgcccgcgtggcgcagttcgcgggactcctgagctacgacgggctcgggaagctggtgtacctccacgcgtgcgtgacggagacgctccgcctgtacccggcggtgccgcaggaccccaagggcatcgcggaggacgacgtgctcccggacggcaccaaggtgcgcgccggcgggatggtgacgtacgtgccctactccatggggcggatggagtacaactggggccccgacgccgccagcttccggccagagcggtggatcggcgacgacggcgccttccgcaacgcgtcgccgttcaagttcacggcgttccaggcggggccgcggatctgcctgggcaaggactcggcgtacctgcagatgaagatggcgctggccatcctgtgcaggttcttcaggttcgagctcgtggagggccaccccgtcaagtaccgcatgatgaccatcctctccatggcgcacggcctcaaggtccgcgtctccagggtgccgctcgcctgatcttgatctggttccggcgacggtgatggacgctccggtggctgtctggccagacggccggcgtgttatgacaggctcgatttaacttagcaattgtgataaactcgtatatgtaggcagagtggagagtgtgttgatcgatttgccatggacgttgctcgtccgttgttaccgtcgtaccatgtttgtattgcttctagatcattatagttcgtgtttgttcttgagcctaagtatttattgcacatttcaaaaatgacaaatgtgtgcaattgtcttttttgggtgttttctaagggtagtattttcgcagatttattctgtcgaccaaaccttagcctttgacccctctcgccgtcgtccggatgcgacgtgggcaggaaggctgctcctcgtggggtgccagacatgttggagctggtggaatgttgcaggacagcgacggtgatgagtggtcagattgccgttgtcgacaggcgatgctcgatggtggcgctggtgaaggtgacggtggtcggaggatcacatatccagcacgacgatcttcaacagcggcccggcttggctaggtcattggacaagcaataatcctacacctacgaaaattgctacgtaggcttacttaacctttcataaaattctctccttccccgtgactttaaccggggtggaccccagctgctaatcctggcccaattagcaacctccacatcatcttttacgtcagatctatacgtaacattacgtatgtgtagcattgctcacaagcttggacaagagggtattgatgcatggtcctggatggtgacgagctcgacatcagacccagagctatcatgcaacgatatgtgttttttc

SEQ ID NO: 198 - DNA, 1656 bp, Triticum aestivum
  source 1..1656: mol_type = unassigned DNA
atgagcagccccatggaggaagctcacggcggcatgccgtcgacgacggccttcttcccgctggcagggctccacaagttcatggccatcttcctcgtgttcctctcgtggatcttggtccactggtggagcctgaggaagcagaaggggccgaggtcatggccggtcatcggcgcgacgctggagcagctgaggaactactaccggatgcacgactggctcgtggagtacctgtccaagcaccggacggtgaccgtcgacatgcccttcacctcctacacctacatcgccgacccggtgaacgtcgagcatgtgctcaagaccaacttcaacaattaccccaagggggaggtgtacaggtcctacatggacgtgctgctcggcgacggcatattcaacgccgacggcgagctctggaggaagcagaggaagacggcgagcttcgagttcgcttccaagaacttgagagacttcagcacgatcgtgttcagggagtactccctgaagctgtccagcatactgagccaggcttgcaaggccggcaaagttgtggacatgcaggagctgtatatgaggatgacgctggactcgatctgcaaagtggggttcggagtcgagatcggcacgctgtcgccggagctgccggagaacagcttcgcgcaggcgttcgacgccgccaacatcatcgtgacgctgcggttcatcgacccgctgtggcgcgtgaagaagttcctgcacgtcggctcggaggcgctgctggagcagagcatcaagctcgtcgacgagttcacctacagcgtcatccgccggcgcaaggccgagatcgtgcaggcccgggccagcggcaagcaggagaagatcaagcacgacatactgtcgcggttcatcgagctgggcgaggccggcggcgacgacggcggcagtctgttcggggacgacaagggcctccgcgacgtggtgctcaacttcgtgatcgccgggcgggacaccacggccacgacgctgtcctggttcacctacatggccatgacgcacccggacgtggccgagaagctccgccgcgagctggccgccttcgaggcggagcgcgcccgcgaggatggcgtcgctctggtcccctgcggcgacggcgagggctccgacgaggccttcgctgcccgcgtggcgcagttcgcggggttcctgagctacgacggcctcgggaagctggtgtacctccacgcgtgcgtgacggagacgctgcgcctgtacccggcggtgccgcaggaccccaagggcatcgcggaggacgacgtgctcccggacggcaccaaggtgcgcgccggcgggatggtgacgtacgtgccctactccatggggcggatggagtacaactggggccccgacgccgccagcttccggccggagcggtggatcggcgacgacggcgccttccgcaacgcgtcgccgttcaagttcacggcgttccaggcggggccgcggatttgcctcggcaaggactcggcgtacctgcagatgaagatggcgctggcaatcctgtgcaggttcttcaggttcgagctcgtggagggccaccccgtcaagtaccgcatgatgaccatcctctccatggcgcacggcctcaaggtccgcgtctccagggcgccgctcgcctga

SEQ ID NO: 199 - protein, 551 aa, Triticum aestivum
MSSPMEEAHGGMPSTTAFFPLAGLHKFMAIFLVFLSWILVHWWSLRKQKGPRSWPVIGATLEQLRNYYRMHDWLVEYLSKHRTVTVDMPFTSYTYIADPVNVEHVLKTNFNNYPKGEVYRSYMDVLLGDGIFNADGELWRKQRKTASFEFASKNLRDFSTIVFREYSLKLSSILSQACKAGKVVDMQELYMRMTLDSICKVGFGVEIGTLSPELPENSFAQAFDAANIIVTLRFIDPLWRVKKFLHVGSEALLEQSIKLVDEFTYSVIRRRKAEIVQARASGKQEKIKHDILSRFIELGEAGGDDGGSLFGDDKGLRDVVLNFVIAGRDTTATTLSWFTYMAMTHPDVAEKLRRELAAFEAERAREDGVALVPCGDGEGSDEAFAARVAQFAGFLSYDGLGKLVYLHACVTETLRLYPAVPQDPKGIAEDDVLPDGTKVRAGGMVTYVPYSMGRMEYNWGPDAASFRPERWIGDDGAFRNASPFKFTAFQAGPRICLGKDSAYLQMKMALAILCRFFRFELVEGHPVKYRMMTILSMAHGLKVRVSRAPLA

SEQ ID NO: 200 - DNA, 3545 bp, Triticum aestivum
  source 1..3545: mol_type = unassigned DNA
ctttgtagagatttcactatgaaccacatacggatgtatataaatgcattttagaagtagattcactcattttgctccatatgtagtccatagtgaaacctctacaaagacttgtatttaggacggatggagcaataaatagaaggtgatcattttcatcaaaaatttcatttgtttggtcctgttaaaaaattctaattaatatagaagggggaaactttcaacaatattttccatctttgtgattttcaggctttttccatttagggagaacatcagagcaccccttgacaccccttcattccaaatttctcaacttgctctgcttttgacttcaaaaactattggttagtgcgggttcattaaagatcagatggaccataaccatggctccaactgtgaagatgagatcatcacagtgctaattgtcaaaaaaatgcatcacctacatcccccgcaaaagaaaataaaaatgcatcacctacatgtacagtattttcttggtcagcagatcacaaaaaggacacaaacggtaggttccatctagtcagggggttaggttagggacaccatgtggatgaggcaatcttaattctcggccacaccaagattgtttggtgctcggcagcactaatgcccaatatattacctaaccgagccatccaaatgctacatacagttaatcctcctgtagactgaacccccttcatgagcagccccatggaggaagctcacggcggcatgccgtcgacgacggccttcttcccgctggcagggctccacaagttcatggccatcttcctcgtgttcctctcgtggatcttggtccactggtggagcctgaggaagcagaaggggccgaggtcatggccggtcatcggcgcgacgctggagcagctgaggaactactaccggatgcacgactggctcgtggagtacctgtccaagcaccggacggtgaccgtcgacatgcccttcacctcctacacctacatcgccgacccggtgaacgtcgagcatgtgctcaagaccaacttcaacaattaccccaaggtgaaacaatcctcgagatgtcagtaaaggttcagtataatcggtactgacagtgttacaaatgtctgaaatctgaaattgtatgtgtagggggaggtgtacaggtcctacatggacgtgctgctcggcgacggcatattcaacgccgacggcgagctctggaggaagcagaggaagacggcgagcttcgagttcgcttccaagaacttgagagacttcagcacgatcgtgttcagggagtactccctgaagctgtccagcatactgagccaggcttgcaaggccggcaaagttgtggacatgcaggtaactgaactcattcccttggtcatctgaacgttgatttcttggacaaaatttcaagattctgacgcgagcgagcgaattcaggagctgtatatgaggatgacgctggactcgatctgcaaagtggggttcggagtcgagatcggcacgctgtcgccggagctgccggagaacagcttcgcgcaggcgttcgacgccgccaacatcatcgtgacgctgcggttcatcgacccgctgtggcgcgtgaagaagttcctgcacgtcggctcggaggcgctgctggagcagagcatcaagctcgtcgacgagttcacctacagcgtcatccgccggcgcaaggccgagatcgtgcaggcccgggccagcggcaagcaggagaaggtgcgtgcgtggtcatcgtcattcgtcaagctcccggtcgctggtttgtgtagatgccatggatcactgacacactaactgggcgcgcagatcaagcacgacatactgtcgcggttcatcgagctgggcgaggccggcggcgacgacggcggcagtctgttcggggacgacaagggcctccgcgacgtggtgctcaacttcgtgatcgccgggcgggacaccacggccacgacgctgtcctggttcacctacatggccatgacgcacccggacgtggccgagaagctccgccgcgagctggccgccttcgaggcggagcgcgcccgcgaggatggcgtcgctctggtcccctgcggcgacggcgagggctccgacgaggccttcgctgcccgcgtggcgcagttcgcggggttcctgagctacgacggcctcgggaagctggtgtacctccacgcgtgcgtgacggagacgctgcgcctgtacccggcggtgccgcaggaccccaagggcatcgcggaggacgacgtgctcccggacggcaccaaggtgcgcgccggcgggatggtgacgtacgtgccctactccatggggcggatggagtacaactggggccccgacgccgccagcttccggccggagcggtggatcggcgacgacggcgccttccgcaacgcgtcgccgttcaagttcacggcgttccaggcggggccgcggatttgcctcggcaaggactcggcgtacctgcagatgaagatggcgctggcaatcctgtgcaggttcttcaggttcgagctcgtggagggccaccccgtcaagtaccgcatgatgaccatcctctccatggcgcacggcctcaaggtccgcgtctccagggcgccgctcgcctgatcttgatctggttccggcgacggtgatggacctggacgctccggtggctggctggccggacggccggcgcgttatgacacgctcgatttaacttggcaactgtgataaactcgtatatgtaggcagagtggagagggtattgatcgatttgccattgacgttgccctactccatggatgtttgtattgcctctagatcattatagttcgtgtttgttcttgagcctaagtatttattgcacatttcaaaatgacaaatgtatgcaattgtcttttctggatgttttctaaggattttcgtagatttattttgtcgatcaaaccctagccgtcacacatgattcgatccctctatgggagctcgacacggaggagctggtgagctgctacaggacgacgacgctaatgagtggtcgaattgcggttgttggcaggcgatgctcgatggcggcgttggtgaagccggcggtggtcgcagggtcacatatccagcgcggcgatcttcaacagaggcccaacttggccagatcatcggagaagagggcatcgatgcatggtcctggatggcgacgagctcgacatcagacccgcacctatcatgcagcggcatgtttgttagtcctaatttaggaataaggtccccctggtccgttcatatgtttatcccgacgaagggcgtgttgagccgtgtctttgatttgtcttctgggattcggttggcttagatttcgtggtggattcatctggattcagacgactttcgtagtctacgaaattcctacaggtccttatcggcattttcttctctggggcaccgatttgattcgtagatcgtggccgccggcatcttctagtctagatcaacgacttccctgacgctgcttctacaagcttatgagttttaaaaaagtttgcttc

SEQ ID NO: 201 - DNA, 1242 bp, Triticum aestivum
  source 1..1242: mol_type = unassigned DNA
atggaagagaagaagccgcggcggcagggagccgcaggacgcgatggcatcgtgcagtacccgcacctcttcatcgcggccctggcgctggccctggtcctcatggaccccttccacctcggcccgctggccgggatcgactaccggccggtgaagcacgagctggcgccgtacagggaggtcatgcagcgctggccgagggacaacggcagccgcctcaggctcggcaggctcgagttcgtcaacgaggtgttcgggccagagtccatcgagttcgaccgccagggccgcgggccctacgccgggctcgccgacggccgcgtcgtgcggtggatgggggacaaggccgggtgggagacgttcgccgtcatgaatcctgactggtcggagaaagtttgtgctaacggagtggagtcgacgacgaagaagcagcacgggaaggagaagtggtgcggccggcctctcgggctgaggttccacagggagaccggcgagctcttcatcgccgacgcgtactatgggctcatggccgttggcgaaagcggcggcgtggcgacctccctggcgagggaggccggcggggacccggtccacttcgccaacgacctcgacatccacatgaacggctcgatattcttcaccgacacgagcacgagatacagcagaaaggaccatttgaacattttgctggaaggagaaggcacggggaggctgctgagatatgaccgagaaaccggtgccgttcatgtcgtgctcaacgggctggtcttcccaaacggcgtgcagatctcacaggaccagcaatttctcctcttctccgagacaacaaactgcaggatcatgaggtactggctggaaggtccaagagcgggccaggtggaggtgttcgcgaacctgccggggttccccgacaacgtgcgcttgaacagcaaggggcagttctgggtggcgatcgactgctgccggacgccgacgcaggaggtgttcgcgcggtggccgtggctgcggaccgcctacttcaagatcccggtgtcgatgaagacgctggggaagatggtgagcatgaagatgtacacgcttctcgcgctcctcgacggcgaggggaacgtggtcgaggtactcgaggaccggggcggcgaggtgatgaagctggtgagcgaggtgagggaggtggaccggaggctgtggatcgggaccgttgcgcacaaccacatcgccacgatcccttatccgttggactag

SEQ ID NO: 202 - protein, 413 aa, Triticum aestivum
MEEKKPRRQGAAGRDGIVQYPHLFIAALALALVLMDPFHLGPLAGIDYRPVKHELAPYREVMQRWPRDNGSRLRLGRLEFVNEVFGPESIEFDRQGRGPYAGLADGRVVRWMGDKAGWETFAVMNPDWSEKVCANGVESTTKKQHGKEKWCGRPLGLRFHRETGELFIADAYYGLMAVGESGGVATSLAREAGGDPVHFANDLDIHMNGSIFFTDTSTRYSRKDHLNILLEGEGTGRLLRYDRETGAVHVVLNGLVFPNGVQISQDQQFLLFSETTNCRIMRYWLEGPRAGQVEVFANLPGFPDNVRLNSKGQFWVAIDCCRTPTQEVFARWPWLRTAYFKIPVSMKTLGKMVSMKMYTLLALLDGEGNVVEVLEDRGGEVMKLVSEVREVDRRLWIGTVAHNHIATIPYPLD

SEQ ID NO: 203 - DNA, 3248 bp, Triticum aestivum
  source 1..3248: mol_type = unassigned DNA
aggacagacgcttaattagacgtttctcctgtagaaataggcacaaatgcttcaaaaaaatccgatttgtttttataagcacctagcattgtacgaggccttacgtatttgttgggtgcttaaaaaggaagagaaagaaagaaagaaagcgatctagaaatttaaacactgaagggacccatgtcgtcaccctagggccttccgaaacgtaggaccgaccctacacgcaccgcattacgccaattatctctccctctaatccccttataattacctctataacatctgtcaataactaaatcattatcacgaatgataccgaattcttgactgctcccttgctcttctgcttctttctcctccaaagtttgctcttctctccctgatcctgatcctcaccagatcaggtcatgcatgataattggctcggtatatcctcctggatcactttatgcttgctttttttgagaatccactttatgcttgttgacctgtacatcttgcatcactatccaagcaacgaaggcatgcaaatcccaaattccaaaagcgccatatccccttagctgttctgaaccgaaatacacctactcccaaacgatcacaccgacccatgcaacctccgtgcgtgccgggataatattgtcacgctagctgactcatgcaactcccgtgcatgtcggtatatattttcggggcaaatccattaagaatttaagatcacattgcccgcgcttttttcgtccgcatgcaaactagagccactgccctctacctccatggaagagaagaagccgcggcggcagggagccgcaggacgcgatggcatcgtgcagtacccgcacctcttcatcgcggccctggcgctggccctggtcctcatggaccccttccacctcggcccgctggccgggatcgactaccggccggtgaagcacgagctggcgccgtacagggaggtcatgcagcgctggccgagggacaacggcagccgcctcaggctcggcaggctcgagttcgtcaacgaggtgttcgggccagagtccatcgagttcgaccgccagggccgcgggccctacgccgggctcgccgacggccgcgtcgtgcggtggatgggggacaaggccgggtgggagacgttcgccgtcatgaatcctgactggtattggcttactgcagaaaaaccatagcttacctgtgtgtgtgcaaactaaaatagttttttcggaaaaaaaaaggtcggagaaagtttgtgctaacggagtggagtcgacgacgaagaagcagcacgggaaggagaagtggtgcggccggcctctcgggctgaggttccacagggagaccggcgagctcttcatcgccgacgcgtactatgggctcatggccgttggcgaaagcggcggcgtggcgacctccctggcgagggaggccggcggggacccggtccacttcgccaacgacctcgacatccacatgaacggctcgatattcttcaccgacacgagcacgagatacagcagaaagtgagcggagtactgctgccgatctcctttttctgttcttgagatttgtgtttgacaaatgactgatcatgcagggaccatttgaacattttgctggaaggagaaggcacggggaggctgctgagatatgaccgagaaaccggtgccgttcatgtcgtgctcaacgggctggtcttcccaaacggcgtgcagatctcacaggaccagcaatttctcctcttctccgagacaacaaactgcaggtgagataaactcaggttttcagtatgatccggctcgagagatccaggaactgatgacgcctttattaatcggctcatgcatgcacactaggatcatgaggtactggctggaaggtccaagagcgggccaggtggaggtgttcgcgaacctgccggggttccccgacaacgtgcgcttgaacagcaaggggcagttctgggtggcgatcgactgctgccggacgccgacgcaggaggtgttcgcgcggtggccgtggctgcggaccgcctacttcaagatcccggtgtcgatgaagacgctggggaagatggtgagcatgaagatgtacacgcttctcgcgctcctcgacggcgaggggaacgtggtcgaggtactcgaggaccggggcggcgaggtgatgaagctggtgagcgaggtgagggaggtggaccggaggctgtggatcgggaccgttgcgcacaaccacatcgccacgatcccttatccgttggactagagtgtgtagtgtctcatttgatttgctggttttatattagcaaggaggtgtatcagtttatggtttgcttgtttattgggttcgtgtgatgatcatgttgtgaatttgacgatggattctttttcttttgtgacaagaactcggatctttataaaagctcacgagaagtacaaggcataataaaaattacattgagattctagaactgtaatgcaattgtttgagttttcatgtatatatgaattgatcatgttttttgatttgtttgtacaccacctcgacatacaaggaccaaagagtataaggacttatagttctacgcaacgagctcaacctcaaacgcattgtcatcccttctctccttgaaataaaaaagcaatattgatgcaagcaccgcgccagggcgttggccctctacagcttgacatgtgtcatcatctacttggttgccacgtacatgccaatttagaagtttttcttaactttcttttttctatattcattgagatttaccgttgaggccatggaaatattcgaatgggtctcggcctgcccactccaaatctcccgctccatccctttctttgttcttctagtccaaacggaaatatgagagaaggttagagtcttgattgttgtgcctagaaaaaaacgatgcctgagtggagcctgagtgggggaccttttttgcctggccaggcaagcctaggcgtgggtgtttggttccttctctaggtggtcagtttgtcctttagcacttagataaattttgtactgcgggccatactgtttatgactcgctatcagcgctaggcaggcagctggccaggcagaacaaatagaatgcctgggcgaggctaaccaggttgcctgggccaagcatgtttctttcttttgttttttaaatctagaccaagttaatcacgttgcatggactcccatgccaggaagatgtttcattttctaggacaccatccaaataaata

SEQ ID NO: 204 - DNA, 1242 bp, Triticum aestivum
  source 1..1242: mol_type = unassigned DNA
atggaagagaagaagccgcggcggcagggagccgcagtacgcgatggcatcgtgcagtacccgcacctcttcatcgcggccctggcgctggccctggtcgtcatggaccccttccacctcggcccgctggctgggatcgactaccggccggtgaagcacgagctggcgccatacagggaggtcatgcagcgctggccgagggacaacggcagccgcctcaggctcggcaggctcgagttcgtcaacgaggtgttcgggccggagtccatcgagttcgacagccagggccgcgggccctacgccgggctcgccgacggccgcgtcgtgcggtggatgggggacaagaccgggtgggagacgttcgccgtcatgaatcctgactggtcggagaaagtttgtgctaacggagtggagtcaacgacgaagaagcagcacgggaaggagaagtggtgcggccggcctctcgggctgaggttccacagggagaccggcgagctcttcatcgccgacgcgtactatgggctcatggccgtcggcgaaagcggcggcgtggcgacctccctggcaagggaggtcggcggggacccggtccacttcgccaacgacctcgacatccacatgaacggctcgatattcttcaccgacacgagcacgagatacagcagaaaggatcatttgaacattttgctagaaggagaaggcacggggaggctgctgagatatgaccgagaaaccggtgccgttcatgtcgtgctcaacgggctggtcttcccaaacggcgtgcagatttcacaggaccagcaatttctcctcttctccgagacaaccaactgcaggatcatgaggtactggctggaaggtccaagagcgggccaggtggaggtgttcgcgaacctgccggggttccccgacaacgtgcgcctgaacagcaaggggcagttctgggtggcgatcgactgctgccggacgccgacgcaggaggtgttcgcgaggtggccgtggctgcggaccgcctacttcaagatcccggtgtcgatgaagacgctggggaagatggtgagcatgaagatgtacacgcttctcgcgctcctcgacggcgaggggaacgtggtggaggtgctcgaggaccggggcggcgaggtgatgaagctggtgagcgaggtgagggaggtggaccggaggctgtggatcgggaccgttgcgcacaaccacatcgccacgatcccttacccgctggactag

SEQ ID NO: 205 - protein, 413 aa, Triticum aestivum
MEEKKPRRQGAAVRDGIVQYPHLFIAALALALVVMDPFHLGPLAGIDYRPVKHELAPYREVMQRWPRDNGSRLRLGRLEFVNEVFGPESIEFDSQGRGPYAGLADGRVVRWMGDKTGWETFAVMNPDWSEKVCANGVESTTKKQHGKEKWCGRPLGLRFHRETGELFIADAYYGLMAVGESGGVATSLAREVGGDPVHFANDLDIHMNGSIFFTDTSTRYSRKDHLNILLEGEGTGRLLRYDRETGAVHVVLNGLVFPNGVQISQDQQFLLFSETTNCRIMRYWLEGPRAGQVEVFANLPGFPDNVRLNSKGQFWVAIDCCRTPTQEVFARWPWLRTAYFKIPVSMKTLGKMVSMKMYTLLALLDGEGNVVEVLEDRGGEVMKLVSEVREVDRRLWIGTVAHNHIATIPYPLD

SEQ ID NO: 206 - DNA, 3065 bp, Triticum aestivum
  source 1..3065: mol_type = unassigned DNA
tctgtcacaagtacgtattcatccatcctaattttgtgtgtcctattcatgcctagggttctcatgtataaatttctaattcttcgtgttctcttttcttcataattttaggatattagcccgccttacaatgttgtctaagacccgtaaaagaaacaatgttctctaagaagcatttgccgggtgcttaaaaaagaagaaaagaaagaaagaaagtgatctgaaaattcaaacactgaaggggcccatgtcgtcgacctagggccttccgaaacgtagaaccaaacctacacgcaccgcattacgccaattatctctccctctaatcctctgacaatttcctttataatgactgtcaataactaaatccttatcacgaatgagaccgaattttgctcttctctccctgtatcctgatcctcaccagatcaggtcatgcatgataattggctcggtatatcctcctggatcactttatgcttgttgacctgtacatcttgcatcactttccaagcaacaaaggcatgcaagtctcaaattccaaaaaggccatatccccttagctgttctgaaccgaaatacacctactcccaaacgatcacaccgacccatgcaacctccgtgcatgtcgggataatcttgtgacgctagctaactcatgcaactcccgtgcatgtcggaatatattttcggggcaaatccattaagaatttaagatcacgttgcccgcgcttttttcgtctgcatgcaaacgagaaccactgccctctgcctccatggaagagaagaagccgcggcggcagggagccgcagtacgcgatggcatcgtgcagtacccgcacctcttcatcgcggccctggcgctggccctggtcgtcatggaccccttccacctcggcccgctggctgggatcgactaccggccggtgaagcacgagctggcgccatacagggaggtcatgcagcgctggccgagggacaacggcagccgcctcaggctcggcaggctcgagttcgtcaacgaggtgttcgggccggagtccatcgagttcgacagccagggccgcgggccctacgccgggctcgccgacggccgcgtcgtgcggtggatgggggacaagaccgggtgggagacgttcgccgtcatgaatcctgactggtaattggcttactgcagataaatccatagcttacctgtgtgtttgcaaactaaaatgatttcttgggaaaaaaaaaggtcggagaaagtttgtgctaacggagtggagtcaacgacgaagaagcagcacgggaaggagaagtggtgcggccggcctctcgggctgaggttccacagggagaccggcgagctcttcatcgccgacgcgtactatgggctcatggccgtcggcgaaagcggcggcgtggcgacctccctggcaagggaggtcggcggggacccggtccacttcgccaacgacctcgacatccacatgaacggctcgatattcttcaccgacacgagcacgagatacagcagaaagtgagcggagtactgtcgctgatctccatttttgttcttgagatgttgtgtttgagtgtctgacaccatgactgatcatgcagggatcatttgaacattttgctagaaggagaaggcacggggaggctgctgagatatgaccgagaaaccggtgccgttcatgtcgtgctcaacgggctggtcttcccaaacggcgtgcagatttcacaggaccagcaatttctcctcttctccgagacaaccaactgcaggtgagataaactcaggttttcagtatgatccggctcgagagatccaggaactgatgacggatcatgcatgcacgctaggatcatgaggtactggctggaaggtccaagagcgggccaggtggaggtgttcgcgaacctgccggggttccccgacaacgtgcgcctgaacagcaaggggcagttctgggtggcgatcgactgctgccggacgccgacgcaggaggtgttcgcgaggtggccgtggctgcggaccgcctacttcaagatcccggtgtcgatgaagacgctggggaagatggtgagcatgaagatgtacacgcttctcgcgctcctcgacggcgaggggaacgtggtggaggtgctcgaggaccggggcggcgaggtgatgaagctggtgagcgaggtgagggaggtggaccggaggctgtggatcgggaccgttgcgcacaaccacatcgccacgatcccttacccgctggactagagggagtgtgcagtgtccatttgctggtttatattagcaaggaggtgtatcagtttatggtttgcttgtttattgggttcgtgtgatgatcatattgtgaatttgacgatggattctttttcttttgtgacaagaactctgatctttataaaggctcacgagaagtatataagcataataaaaattatatcaaggtccttgaatcgtcgaacaaccattgccgccatcagaacaagccgttgtcgtcgcttctgctggagccggcctaatgttgtagatcagcgccttctagttgcagtcgtcaccgtcaaagccttgaatcgatctaaagaatcctacaccaaatcttgccatcgcgtatgcacgacgagaaaccctaacctcaccgcaccgagaagctagcgggaatcaaagacagggctccatctaatccgcccctacttacgaacttgaggaggatcaaaacctatagaagagtaatgatgagtggatttctcagtcattttcatccatgtttaaaccggatattctcagattttttcgagataatcacttcaatttgcctactaatgactaaaataattgcataagattgcaaatcacattgattattttatttcatgcaaaaatttgctattttcggtgataaattaggccataaaagggacataatggctcaagatcaaactcaatcagtcggagccgtgtagcagcttccagaggaagagacaacatgcggtacaaacatggctactcgtatcgatactcgtaccaagcgccaacgaccccatgacgtatccctaacgac

SEQ ID NO: 207 - DNA, 1242 bp, Triticum aestivum
  source 1..1242: mol_type = unassigned DNA
atggaagagaagaaaccgcggcggcagggagccgcagtacgcgatggcatcgtgcagtacccgcacctcttcatcgcggccctggcgctggccctggtcctcatggacccgttccacctcggcccgctggccgggatcgactaccgaccggtgaagcacgagctggcgccgtacagggaggtcatgcagcgctggccgagggacaacggcagccgcctcaggctcggcaggctcgagttcgtcaacgaggtgttcgggccggagtccatcgagttcgaccgccagggccgcgggccttacgccgggctcgccgacggccgcgtcgtgcggtggatgggggacaaggccgggtgggagacgttcgccgtcatgaatcctgactggtcggagaaagtttgtgctaacggagtggagtcgacgacgaagaagcagcacgggaaggagaagtggtgcggccggcctctcggcctgaggttccacagggagaccggcgagctcttcatcgccgacgcgtactatgggctcatggccgtcggcgaaaggggcggcgtggcgacctccctggcgagggaggccggcggggacccggtccacttcgccaacgaccttgacatccacatgaacggctcgatattcttcaccgacacgagcacgagatacagcagaaaggaccatttgaacattttgctggaaggagaaggcacggggaggctgctgagatatgaccgagaaaccggtgccgttcatgtcgtgctcaacgggctggtcttcccaaacggcgtgcagatatcacaggaccagcaatttctcctcttctccgagacaacaaactgcaggatcatgaggtactggctggaaggtccaagagcgggccaggtggaggtgttcgcgaacctgccggggttccccgacaatgtgcgcctgaacagcaaggggcagttctgggtggccatcgactgctgccgtacgccgacgcaggaggtgttcgcgcggtggccgtggctgcggaccgcctacttcaagatcccggtgtcgatgaagacgctggggaagatggtgagcatgaagatgtacacgcttctcgcgctcctcgacggcgaggggaacgtcgtggaggtgctcgaggaccggggcggcgaggtgatgaagctggtgagcgaggtgagggaggtggaccggaggctgtggatcgggaccgttgcgcacaaccacatcgccacgatcccttacccgctggactag

SEQ ID NO: 208 - protein, 413 aa, Triticum aestivum
MEEKKPRRQGAAVRDGIVQYPHLFIAALALALVLMDPFHLGPLAGIDYRPVKHELAPYREVMQRWPRDNGSRLRLGRLEFVNEVFGPESIEFDRQGRGPYAGLADGRVVRWMGDKAGWETFAVMNPDWSEKVCANGVESTTKKQHGKEKWCGRPLGLRFHRETGELFIADAYYGLMAVGERGGVATSLAREAGGDPVHFANDLDIHMNGSIFFTDTSTRYSRKDHLNILLEGEGTGRLLRYDRETGAVHVVLNGLVFPNGVQISQDQQFLLFSETTNCRIMRYWLEGPRAGQVEVFANLPGFPDNVRLNSKGQFWVAIDCCRTPTQEVFARWPWLRTAYFKIPVSMKTLGKMVSMKMYTLLALLDGEGNVVEVLEDRGGEVMKLVSEVREVDRRLWIGTVAHNHIATIPYPLD

SEQ ID NO: 209 - DNA, 3085 bp, Triticum aestivum
  source 1..3085: mol_type = unassigned DNA
aggctttctttaagtatcggtgcttatttgtacaggtcagacgcttaattaggcgtctctcctgtagaaataggcaccgatgcttcaaaaaaaaacccgctctatttttctaagcacataacattgtacaagaccttaagcatttgtcgggtgcttaaaagaaagaaaaagaaagaaagaatgcgatctgaaaatttaaacactgaagggacccatgtcgtcgccctagggccttcctaaacgtaggaccgaccctgcatgcaccgcattacgccaattatctctccctctaatcttcttacaattatctccataacaactgctaataactaaatcattatcacgaatgaggctgaattcttgacttctcccttgctcttctgcttctttctcctccaaagtttgctcttctctccctgtatactgatcctcaccagatcaggtcatgcatgaaaattggctcggtatcctcctggatcactttatgcttgttgacctgtacatcttgcatcactatccaagcaacgaaggcatgcaagtcccaaattccaaaagcgccatatccccttagctgttctgaaccgaaatacacctactcccaaacgatcacaccgacccatgcaacctccgtgcgtgtcgggataatcttgtgacgctagctgactcatgcaactcccgtgcgtgtcggaatatattttcggagcaaatccattaagaatttaagatcacattgcccgcgcttttttcgtctgcatgcaaaacagagccactgccctctacctccatggaagagaagaaaccgcggcggcagggagccgcagtacgcgatggcatcgtgcagtacccgcacctcttcatcgcggccctggcgctggccctggtcctcatggacccgttccacctcggcccgctggccgggatcgactaccgaccggtgaagcacgagctggcgccgtacagggaggtcatgcagcgctggccgagggacaacggcagccgcctcaggctcggcaggctcgagttcgtcaacgaggtgttcgggccggagtccatcgagttcgaccgccagggccgcgggccttacgccgggctcgccgacggccgcgtcgtgcggtggatgggggacaaggccgggtgggagacgttcgccgtcatgaatcctgactggtactggcttactgcagaaaaacccatagcttacctgtgtgtgtgcagactaaaatagtttctttcataaaaaaaaggtcggagaaagtttgtgctaacggagtggagtcgacgacgaagaagcagcacgggaaggagaagtggtgcggccggcctctcggcctgaggttccacagggagaccggcgagctcttcatcgccgacgcgtactatgggctcatggccgtcggcgaaaggggcggcgtggcgacctccctggcgagggaggccggcggggacccggtccacttcgccaacgaccttgacatccacatgaacggctcgatattcttcaccgacacgagcacgagatacagcagaaagtgagcggagtactgctgccgatctcctttttctgttcttgagatttgtgtttgacaaatgactgatcatgcagggaccatttgaacattttgctggaaggagaaggcacggggaggctgctgagatatgaccgagaaaccggtgccgttcatgtcgtgctcaacgggctggtcttcccaaacggcgtgcagatatcacaggaccagcaatttctcctcttctccgagacaacaaactgcaggtgagataaactcaggttttcagtatgatccggctcgagagatccaggaactgatgacggctcatgcatgcacactaggatcatgaggtactggctggaaggtccaagagcgggccaggtggaggtgttcgcgaacctgccggggttccccgacaatgtgcgcctgaacagcaaggggcagttctgggtggccatcgactgctgccgtacgccgacgcaggaggtgttcgcgcggtggccgtggctgcggaccgcctacttcaagatcccggtgtcgatgaagacgctggggaagatggtgagcatgaagatgtacacgcttctcgcgctcctcgacggcgaggggaacgtcgtggaggtgctcgaggaccggggcggcgaggtgatgaagctggtgagcgaggtgagggaggtggaccggaggctgtggatcgggaccgttgcgcacaaccacatcgccacgatcccttacccgctggactagagggagtgtgtagtgtcccatttgatttgctggttttatattagcaaggaggtgtatcagtttatggtttgcttgttcattgggttcgtgtgatgatcatgttgtgaatttgacggtggattctttttcttttgtgacaagaactcggatctttataaatgctcacgagaagtacaaagcataataaaaaattatatcaaggttctagaactgtaatgcaattgtttgagttttcatgtatatgaattgatcatgttttttgatctatttgtacaccacctcgacatacgaggaccaaagagtacaaggacttatagttctacgcgacgagctcaacctcaaacgcattgccatcccttctctccttgaaataaaaaattatatattttttgcagggaaataaaaaaacaatattgatgtatgcatgggcacggcgtgccgccacgccagggcgttggccttctgcagcttggcatgtgtcctcatctacttggttgccatgcacaagtcaatctagaagtttttttaactttcttttttctatattcattgagatttaccgtttaggccatggaaatatttgaatggggctcaacctgcccactcccaatctctcgctccttcgctttcttcgttcttccagtccaaacagaaagatgagagaaggttagagtcctgaatgttgtgtctggaaaaaaatgatgcttgagtggagcctgagtgggggaccttttttgcctagccaggcaagcctaggtgtcggtgtttggttcctttcctgagtggtcggtttatcctttagcgtgggtgtttggttccttccctgggtg

SEQ ID NO: 210 - DNA, 22 bp, synthetic construct
  misc_feature 1..22: note = Description of Artificial Sequence: Syntheticoligonucleotide
  source 1..22: mol_type = other DNA
gcatggcggagccggaggacgg

SEQ ID NO: 211 - DNA, 22 bp, synthetic construct
  misc_feature 1..22: note = Description of Artificial Sequence: Syntheticoligonucleotide
  source 1..22: mol_type = other DNA
gtcgcccctcctgaggcggcgg

SEQ ID NO: 212 - DNA, 22 bp, synthetic construct
  misc_feature 1..22: note = Description of Artificial Sequence: Syntheticoligonucleotide
  source 1..22: mol_type = other DNA
aaggaggagccggcggcagcgg

SEQ ID NO: 213 - DNA, 22 bp, synthetic construct
  misc_feature 1..22: note = Description of Artificial Sequence: Syntheticoligonucleotide
  source 1..22: mol_type = other DNA
gagaccgcctcgccggagccgg

SEQ ID NO: 214 - DNA, 4856 bp, Triticum aestivum
  source 1..4856: mol_type = unassigned DNA
gcatgaacttattatataataacttgaccgaaaaactaccaaagctggcatgaggccaaataacagagtccattgtctccgagagcaccgggaaggaagcagcaagacagtgccaatcttccaactctacaggggacaacacctatggaaacccaaatcccaattcctatcagagagctccacgatggagatcactatatccaaacaataagaaaacaaggttgggaaagagcccgagagaggcccctctccaacccaccaatcaaaccgaaagcgaacagaacgaccatctcccaccacaaacttaactagagacttgaactcatcatgaacacgaatcaactggcgccagaaccgggagcccccagatccataggcaaacaatgggttgccggtggggaaatgtttagctctcaggatatcccaccatagagtcctagcactagttctttactatactcaagccaactataagacttaaaccatttagttacaaatatcgatgcacaccttcggtggggcgttgtgaaaaagcatgttttttgggtcgacaagccccttttgcaacgtatcctcttctaatcctattcagatcattaacatcataagctgcaattgacatgctcttctgaggatcaggttcatgcaattaaacatcataaactgcatctttgatgtcatccttttcctatattttttccagattattggcttgcttcgttttcaatatcaggttctatgattcgacttctgttgttgccagtaataatttgtagttgctgcggaatatgaactcaaggagagctgatggtgctatgaagttgatttgatgggaggttgttctacacctgcacttgctgctcgacttaaatacatgccttggatttcttcccagctctagtacataatatttttcaaattaatgttccacgacataaaatttaaatccacaaacatatttttagtacatgaacaattttctaatatagggcaaacatttttcatatacaaaccgatcattttaatatatggtgaaaatcagtgtaatatatgctgaaatgttttcaaatacatattgaacatatttataataaatggtgaacattttttttaataattgatgaccatttttaaaatgcatattgaacattttataatatacactgtacagttttataataatcgacgaacatcttttggagttctgaacatttttttcaaaaacacaagccattttccaggaagaatacaaatgcaaaagaaatgagatatccaaaaagcaaaaaagaaaaacaaaacaaaacagagaaacctacaggaaaatccaaacagaaaaggcaaagaaagaacccgaactgggccaggcaatgtttccaacggcctcgctcttcctgaacaagaaggccagtcagcccatgggctgctcccagtactcgggccccgctgtggcagcacgccatgtaatagttttcgcgggaatccaacgccgaaatcgcccgcagcgggaacccgacgtcggtctggtgcgttctggcgccttccagaactctccacaggctcccgcagccgtccgatcagatcagcacgaagcacgaacattggcgcgcggcgatattttctttcctcgcccgacgacggccgcactgcatttcattttgaatttcaaaattcggaaacggaaaagctttctcgcatcccgaggcgaggcggttacgggcgccagaggggccaccccacccacccacccccgccctcacgtgccccgcgcggccgcatccgggccgtccgcgcggacagctggccgcgcccagcccgaaccgacgcccaggatcgagcgagggcggcgcgcccggggcttggcttagcgtccacgccacctccggctatataagccgccccacacccgctccccctccggcattccattccgccaccgcaccaccaccaccaccaaaccctagcgagcgagcgagggagagagagaccgccccgccgcgacgatggagagatcccgcgggctgctgctggtggcggggctgctggcggcgctgctgccggcggcggcggcgcagccgggggcgccgtgcgagcccgcgctgctggcgacgcaggtggcgctcttctgcgcgcccgacatgccgacggcccagtgctgcgagcccgtcgtcgccgccgtcgacctcggcggcggggtgccctgcctctgccgcgtcgccgccgagccgcagctcgtcatggcgggcctcaacgccacccacctcctcacgctctacagctcctgcggcggcctccgccccggcggcgcccacctcgccgccgcctgcgaaggtacgttgtccgcctcctcccctccctccctccctccctctctctctacgtgctcgctttcctgcttacctagtagtacgtagtttcccatgccttcttgactcgctagaagtgctccggtttgggtctgttaatttcctcgctgtactaccggatctgtcgtcggcacggcgcgcggcgtcgggtcctcgccttctcccgtggcgaccgacctgcgcagcgcgcgcgcggcctagctagcttcataccgctgtacctcgacatacacggagcgatctatggtctactctgagtatttcctcatcgtagaacgcatgcgccgctcgcgattgtttcgtcgattctagatccgtgcttgttcccgcgagttagtatgcatctgcgtgcatatgccgtacgcacgcagatgcagagtctgttgctcgagttatctactgtcgttcgctcgaccatatttgcctgttaatttcctgttcatcgtgcatgcagtagtagtagccatgtccacgccttcttgttttgaggcgatcatcgtcgagatccatggctttgctttctgcactatcttctgccttgttttgttctccgcagtacgtacgtcttgcttggtcaaaactgaaaaacgctttgctgtttgtttgatcggcaagagctggccgtgcttttggcaccgcagtgcgtcgcctctgccgcttttgcgaaacatttccatgttgatcctctggcggaactactttttcgcgtgcggtttgcgtggccttcctctctcgtgaaaagaggtcgggtcaaaccaaatggatcgcctcttggcagagcagcggcagcagatagctggccgtctcgcagctttggcagaaccggtctgtggccatctgtcgccgcctgccaccgtttccctgatgtttgtttctctctcgcctgccactgtttcttttcttgttgcgcacgtacgtcgtcacctcctcctacttttttgccagttttgtttacttttgatgaaatatacggatgaatcggctggtgattaactttggctgctgctgttaattactgtggattttggatgcaggacccgctcccccggccgccgtcgtcagcagccccccgcccccgcctccaccgtccgccgcacctcgccgcaagcagccagcgcgtaagaacctctccctctccctctctctctccctctcgcctgcatctcgctatgtttatccatgtccatatgttgatcagccttgtttagttactaacatgtgcaccggatcgggttctcgcagacgacgcaccaccgccgccaccgccgtcgagcgagaagccgtcgtccccgccgccgtcccaggaccacgacggcgccgccccccgcgccaaggccgcgcccgcccaggcggccacctccacgctcgcgcccgccgccgccgccaccgccccgccgccccaggcgccgcactccgccgcgcccacggcgccgtccaaggcggccttcttcttcgtcgccacggccatgctcggcctctacatcatcctctgagtcgcgcgccgaccccgcgagagaccgtggtccgtccagtcgcagtagagtagagcgctcgtcgtctcgttccgtttcgtgcctgtcgccgttcgaggttcgtttctgcgtgcagtccggtcgaagaagccggtgggttttgagtactagtggtagtagtagcagcagctatcgtttctgtccgctcgtacgtgtttgcgtggtcgcggagaacaattaattgggtgtttgcgagtcctctggttaagatgaaccactgatgctatgtgatcgatcgatcggtatgatctgaatggaaatggatcaagttttgcgttctgctgatgatgtgatccatttggatctgtgtggggcaacagtttcgcttgcttttgctctgcgatgaacgaatgcttcttgcatgcatcttgtctttgcttaatttgaactgtagaacggatgcagtactgatttctgcttatgatgtgacgattcgtcgtacgcatatcatctcttcaaatttgtgtagcagctgtttgtagcttccattctgctatggacgaatgcctgtttttcacggagaaccgcgcgcggggaccgatgcggctttgtgttgccatgttgttttccacgccaggacaaaatagatggtgcggttttgatccccaatcccaccatcaccatgttccggagagccacatggaactcacgtcaagcggtcactttttgcagaatcactcttaccattttacccttttgttgaaacctctctcctcatccccaaaagttgatgcaacagtgctatgcgcgcccacccatgctttttcatatgattgtaaaatttggatcgattttatcttttgaaccctaagtccggtttacaatctgtttgcatgtttatgttccttgcggcgaggaccattaaacaagactactattggatatatttcgacaggctttgaaatccgaattctaaaacatggtgagactctatgagacacaagaatgctctttagaacac

SEQ ID NO: 215 - DNA, 648 bp, Triticum aestivum
  source 1..648: mol_type = unassigned DNA
atggagagatcccgcgggctgctgctggtggcggggctgctggcggcgctgctgccggcggcggcggcgcagccgggggcgccgtgcgagcccgcgctgctggcgacgcaggtggcgctcttctgcgcgcccgacatgccgacggcccagtgctgcgagcccgtcgtcgccgccgtcgacctcggcggcggggtgccctgcctctgccgcgtcgccgccgagccgcagctcgtcatggcgggcctcaacgccacccacctcctcacgctctacagctcctgcggcggcctccgccccggcggcgcccacctcgccgccgcctgcgaaggacccgctcccccggccgccgtcgtcagcagccccccgcccccgcctccaccgtccgccgcacctcgccacgacgcaccaccgccgccaccgccgtcgagcgagaagccgtcgtccccgccgccgtcccaggaccacgacggcgccgccccccgcgccaaggccgcgcccgcccaggcggccacctccacgctcgcgcccgccgccgccgccaccgccccgccgccccaggcgccgcactccgccgcgcccacggcgccgtccaaggcggccttcttcttcgtcgccacggccatgctcggcctctacatcatcctctga

SEQ ID NO: 216 - protein, 215 aa, Triticum aestivum
MERSRGLLLVAGLLAALLPAAAAQPGAPCEPALLATQVALFCAPDMPTAQCCEPVVAAVDLGGGVPCLCRVAAEPQLVMAGLNATHLLTLYSSCGGLRPGGAHLAAACEGPAPPAAVVSSPPPPPPPSAAPRHDAPPPPPPSSEKPSSPPPSQDHDGAAPRAKAAPAQAATSTLAPAAAATAPPPQAPHSAAPTAPSKAAFFFVATAMLGLYIIL

SEQ ID NO: 217 - DNA, 23 bp, synthetic construct
  misc_feature 1..23: note = Description of Artificial Sequence: Syntheticoligonucleotide
  source 1..23: mol_type = other DNA
gcgggctgctgctggtggcgggg

SEQ ID NO: 218 - DNA, 4856 bp, Triticum aestivum
  source 1..4856: mol_type = unassigned DNA
gcatgaacttattatataataacttgaccgaaaaactaccaaagctggcatgaggccaaataacagagtccattgtctccgagagcaccgggaaggaagcagcaagacagtgccaatcttccaactctacaggggacaacacctatggaaacccaaatcccaattcctatcagagagctccacgatggagatcactatatccaaacaataagaaaacaaggttgggaaagagcccgagagaggcccctctccaacccaccaatcaaaccgaaagcgaacagaacgaccatctcccaccacaaacttaactagagacttgaactcatcatgaacacgaatcaactggcgccagaaccgggagcccccagatccataggcaaacaatgggttgccggtggggaaatgtttagctctcaggatatcccaccatagagtcctagcactagttctttactatactcaagccaactataagacttaaaccatttagttacaaatatcgatgcacaccttcggtggggcgttgtgaaaaagcatgttttttgggtcgacaagccccttttgcaacgtatcctcttctaatcctattcagatcattaacatcataagctgcaattgacatgctcttctgaggatcaggttcatgcaattaaacatcataaactgcatctttgatgtcatccttttcctatattttttccagattattggcttgcttcgttttcaatatcaggttctatgattcgacttctgttgttgccagtaataatttgtagttgctgcggaatatgaactcaaggagagctgatggtgctatgaagttgatttgatgggaggttgttctacacctgcacttgctgctcgacttaaatacatgccttggatttcttcccagctctagtacataatatttttcaaattaatgttccacgacataaaatttaaatccacaaacatatttttagtacatgaacaattttctaatatagggcaaacatttttcatatacaaaccgatcattttaatatatggtgaaaatcagtgtaatatatgctgaaatgttttcaaatacatattgaacatatttataataaatggtgaacattttttttaataattgatgaccatttttaaaatgcatattgaacattttataatatacactgtacagttttataataatcgacgaacatcttttggagttctgaacatttttttcaaaaacacaagccattttccaggaagaatacaaatgcaaaagaaatgagatatccaaaaagcaaaaaagaaaaacaaaacaaaacagagaaacctacaggaaaatccaaacagaaaaggcaaagaaagaacccgaactgggccaggcaatgtttccaacggcctcgctcttcctgaacaagaaggccagtcagcccatgggctgctcccagtactcgggccccgctgtggcagcacgccatgtaatagttttcgcgggaatccaacgccgaaatcgcccgcagcgggaacccgacgtcggtctggtgcgttctggcgccttccagaactctccacaggctcccgcagccgtccgatcagatcagcacgaagcacgaacattggcgcgcggcgatattttctttcctcgcccgacgacggccgcactgcatttcattttgaatttcaaaattcggaaacggaaaagctttctcgcatcccgaggcgaggcggttacgggcgccagaggggccaccccacccacccacccccgccctcacgtgccccgcgcggccgcatccgggccgtccgcgcggacagctggccgcgcccagcccgaaccgacgcccaggatcgagcgagggcggcgcgcccggggcttggcttagcgtccacgccacctccggctatataagccgccccacacccgctccccctccggcattccattccgccaccgcaccaccaccaccaccaaaccctagcgagcgagcgagggagagagagaccgccccgccgcgacgatggagagatcccgcgggctgctgctggtggctggactgctggcggcgctgctgccggcggcggcggcgcagccgggggcgccgtgcgagcccgcgctgctggcgacgcaggtggcgctcttctgcgcgcccgacatgccgacggcccagtgctgcgagcccgtcgtcgccgccgtcgacctcggcggcggggtgccctgcctctgccgcgtcgccgccgagccgcagctcgtcatggcgggcctcaacgccacccacctcctcacgctctacagctcctgcggcggcctccgccccggcggcgcccacctcgccgccgcctgcgaaggtacgttgtccgcctcctcccctccctccctccctccctctctctctacgtgctcgctttcctgcttacctagtagtacgtagtttcccatgccttcttgactcgctagaagtgctccggtttgggtctgttaatttcctcgctgtactaccggatctgtcgtcggcacggcgcgcggcgtcgggtcctcgccttctcccgtggcgaccgacctgcgcagcgcgcgcgcggcctagctagcttcataccgctgtacctcgacatacacggagcgatctatggtctactctgagtatttcctcatcgtagaacgcatgcgccgctcgcgattgtttcgtcgattctagatccgtgcttgttcccgcgagttagtatgcatctgcgtgcatatgccgtacgcacgcagatgcagagtctgttgctcgagttatctactgtcgttcgctcgaccatatttgcctgttaatttcctgttcatcgtgcatgcagtagtagtagccatgtccacgccttcttgttttgaggcgatcatcgtcgagatccatggctttgctttctgcactatcttctgccttgttttgttctccgcagtacgtacgtcttgcttggtcaaaactgaaaaacgctttgctgtttgtttgatcggcaagagctggccgtgcttttggcaccgcagtgcgtcgcctctgccgcttttgcgaaacatttccatgttgatcctctggcggaactactttttcgcgtgcggtttgcgtggccttcctctctcgtgaaaagaggtcgggtcaaaccaaatggatcgcctcttggcagagcagcggcagcagatagctggccgtctcgcagctttggcagaaccggtctgtggccatctgtcgccgcctgccaccgtttccctgatgtttgtttctctctcgcctgccactgtttcttttcttgttgcgcacgtacgtcgtcacctcctcctacttttttgccagttttgtttacttttgatgaaatatacggatgaatcggctggtgattaactttggctgctgctgttaattactgtggattttggatgcaggacccgctcccccggccgccgtcgtcagcagccccccgcccccgcctccaccgtccgccgcacctcgccgcaagcagccagcgcgtaagaacctctccctctccctctctctctccctctcgcctgcatctcgctatgtttatccatgtccatatgttgatcagccttgtttagttactaacatgtgcaccggatcgggttctcgcagacgacgcaccaccgccgccaccgccgtcgagcgagaagccgtcgtccccgccgccgtcccaggaccacgacggcgccgccccccgcgccaaggccgcgcccgcccaggcggccacctccacgctcgcgcccgccgccgccgccaccgccccgccgccccaggcgccgcactccgccgcgcccacggcgccgtccaaggcggccttcttcttcgtcgccacggccatgctcggcctctacatcatcctctgagtcgcgcgccgaccccgcgagagaccgtggtccgtccagtcgcagtagagtagagcgctcgtcgtctcgttccgtttcgtgcctgtcgccgttcgaggttcgtttctgcgtgcagtccggtcgaagaagccggtgggttttgagtactagtggtagtagtagcagcagctatcgtttctgtccgctcgtacgtgtttgcgtggtcgcggagaacaattaattgggtgtttgcgagtcctctggttaagatgaaccactgatgctatgtgatcgatcgatcggtatgatctgaatggaaatggatcaagttttgcgttctgctgatgatgtgatccatttggatctgtgtggggcaacagtttcgcttgcttttgctctgcgatgaacgaatgcttcttgcatgcatcttgtctttgcttaatttgaactgtagaacggatgcagtactgatttctgcttatgatgtgacgattcgtcgtacgcatatcatctcttcaaatttgtgtagcagctgtttgtagcttccattctgctatggacgaatgcctgtttttcacggagaaccgcgcgcggggaccgatgcggctttgtgttgccatgttgttttccacgccaggacaaaatagatggtgcggttttgatccccaatcccaccatcaccatgttccggagagccacatggaactcacgtcaagcggtcactttttgcagaatcactcttaccattttacccttttgttgaaacctctctcctcatccccaaaagttgatgcaacagtgctatgcgcgcccacccatgctttttcatatgattgtaaaatttggatcgattttatcttttgaaccctaagtccggtttacaatctgtttgcatgtttatgttccttgcggcgaggaccattaaacaagactactattggatatatttcgacaggctttgaaatccgaattctaaaacatggtgagactctatgagacacaagaatgctctttagaacac

SEQ ID NO: 219 - DNA, 24 bp, Triticum sp.
  source 1..24: mol_type = unassigned DNA
gcgggctgctgctggtggcggggg

SEQ ID NO: 220 - DNA, 24 bp, synthetic construct
  misc_feature 1..23: note = Description of Artificial Sequence: Syntheticoligonucleotide
  source 1..24: mol_type = other DNA
gcgggctgctgctggtggctggag

SEQ ID NO: 221 - DNA, 30078 bp, synthetic construct
  misc_feature 1..30078: note = Description of Artificial Sequence: Syntheticpolynucleotide
  source 1..30078: mol_type = other DNA
ggcaggatatattcaattgtaaaataacttcgtataatgtatgctatacgaagttattgtttctatggaatggcgacggcaccaatgggggagggcgacggcagcgggagcgaggaggagggggaagaagaatgggggagggcgacggcagcgggagctaggaggagggggaagaagaatgggggagggcgacggcgacgggagcgaggagggggaaaagagacgaatgcgggagtggatgactaaagacgagcccgaacggcgccgtctaacggctgccgggacggcctggagtgccacgtacgcgaaaaacgggccccacctgtcataaactcacttaactcagcccgatccgccgatcagtggtttttgcaaaacaattacgcaagacgtggtgctttctgcagagaatctgtatcctagtgtttttcgcaaaccgagccctcaaagtggtggttttatgcaatttactccctgccacaagacaataatcctttctcccctctttctcaatgatttccaacccgcaccccaccaactcacacgggatactaccatctcactgacacagggcctcgatgggcagcaaaggagaattagtggagtccgtaattcttcctccacacaaatacgtactctacctgtagtgttaaaagctgtgggacatatacgtcagtctaactttgactgtcaggtaaggtgcttggaaggtgataaagggtagttttggggtccaacggcccgccactacgctcggcccactgcccagagagagaaacgtgttctcggggaggcggggagagagggagctagcatttccaccgccttcaccctccgatcgcgccagcgtgtcccccctcgccctagggaaggcaggctgggccgtcggatccgggtataagtagcgacgcgcacgcgggccgtgcctattcctgtacttgccgccccgaccacctcccccgtttggttccaccattccattccagcgcaggacggcgggacgcgcgaggcggaggcggaaggaagcggagcgcgctcgcgctagggttcgtccgctccctctccccctctctgttccggccgaatcgaccgaccctagctggctagcgctgacccgctgcgccgaatgcaggcggaagcccccgagatcgcgaggtggtggaggcggagatgacggcgccgcgcggtggcggggatgtgccatcgtcgacggcgtcggcagccgccgccgccgcttcgatgaccgagcccaacacgccgacgtcggcgcacgcgtcggggctcaaccggcgggggtcgaggggcgccgccatggcctccttctccatggaggtcttcgacaacgaggtggtgccgtcctcgctcagcagcatcgcccccatcctgcgcgtcgccgccgagatcgagcacgagcgcccccgcgtcgcctacctctgtaagttcgttgcacttcgaagccgtctccgcgcccgcgcgtgcctgttttgggagattttcgacgccttttcctggcacagctcggcgcatttggtgtctcggtcggacgaaacgggcaactcgtgatgatatgtttggcgattcacagccgttgtagtgtttatttgggaaggttttgtgctcacgaatctcggaaaatacatgccgcgtgcgtcggttgttgttgtttttgtttctgggctgctttgattgttacgagtttattaaggggcatgtctgagatttctccgcgtatgttggttttgctgcgttagctggatcttcggctttgatatgtttctccttactcgtgaagctgatcttagaagtagctagcttctctcctgtatgctgcaccatgaggtgttcgtattcctatatgatcgtatcgacgagatggcttgtgtttgagagcgcagattagatttagttgatgcaacttccagattccaacgttctccctcgattgtgttgcttttgcttgaatttggtatctatttaatacttgctggttatgtttgaatcattaatttaggctaggatagtgctgcgcgatcagtttgcttggaaagttggaataccatatatcaggtagctcgtgtaggttcttcggtgtctctatgtgagatttctccgcctatgtcgatctagctgtacatgctgcgctagattttggatttagtgtgttttctccttttttcagtagctaattttgtcgcaggttagcttctgtatgcttgcattattcgtaccaaaccaaatcactactgtttttcgaagtgcagagccgcagatttgattcattttatggcttttccgacagttctccctagctcgttttgattgaatatgggcgctctctgtgttgtttgaatcatgtcagatatgacagttttgctccaccagcttttctctgaagaagtgcatatcacgtagcatgaatgggtgcttctggttcgcccttttttcgggatctcacgttgatctgttactctgtgaactaggtcggttctatgccttcgagaaggcgcacaggctggatcaaaactctgttggtcgtggcgtccggcagttcaaaacgtccctgcttcagcgcttagagaaggtgtgagacatctttctgtctcttcccctccataatttctgcatgatctagctgacttggcgtacatgagggtttgttttgttagttgatacatgtcgacttgatcatgttccctcgctggttttgactgggtcactgtatctggccttcatagatatattatgcaagttgttgaattattattactaccatcttagctttttaactgcttgcaggatatatataggtaatatagagtatgagtttgtttggctaataagcctcatggagttaaaaataagctggaagctaatatggacgactctaccttaatttagttgtcaaaatgtagtagtggtgcaagttatgttgtccaaatgctcagataaaccaaagggaaataggcaacatatgcacatgcagtttaagccatgaaagtatttcctacttttcatttttgtgttgtaatatatatcttgcagatacacgatttttaacttcaagagtatggtcgctggactttagttcagtacacatttgtttcatgataagcttaccaactccatctccaaatacatgacgtagaaagcatgtagtcaaacttctctacgtttgaccattaatcaaatcaaattatttagtttttttggatagaaattataccattgattcagaacagtttcactatatatctttttacttatatatgttgttcattgaagactcaaaatgcaaaacattatctatcttagaacggtgggagtatatttgattattagtgataagttgataactgtcgataatcaatctggaaattttattgtgattatcctatttgatgaccatattgggagttgtgatcagccaagcaaacctgcaagctcacttaatcctacctaacagataaagaacactgttctagtaatagaatggtgtgcttcgttttattgtgattatcttaatttttaaccatattgggagttgtgatcagccaagcaaacctacaagctcacttgatcctgcctgatagataaagaacattgttccagtaatagaatgttgtgcttcgttctacttattttgtttcaaagtcacaactaaaccttcagttcagattcaacatttatttcgtgtttctgctggggagggggatgaggtaaaatgacttcagattacaccatcctcctcatgattcgtctcaattgatcagtttgcaatggcagattcttgtttgttagagatataatgaggtagccacattctcatctgagcttattttttcagatgatccagttcaaatttaccacttttttgtttcctacttgaaatggccagcgaatgtagtagaatggggaaaaggagcagggacttagggttcccttgttttcttaaatcggattttgcctaacctactcttgaatccaaagatcctgccttaaaatttcccatttcgatcccacgcaatccaacaggataatagcccgagtctcgcaaagcgattgaagaaaactgatgcccgcgaaattgagagtttctatcaagaatactatgagaactatgtccgcaccctcgacaaaggggaacaagccgacaggtaattcccaatccctaacctatactgcgatctcccctataagtccaatccctcgctatcacgaatccggtcccatgacattgtcgcctccaggactcaacttgggaaggcctaccaaacggctggagtcctcttcgaggtgctctgtgccgtcaacaagaatgagaaggttgagcaagttaaccccgaggtttgtgctcactccagccaactgtcgtcgttctttctcagtagaaatctaggttccctctaatgcatcaagtttttccaaatttcctctgcacagattatgcgctggcacactgaggtgcaagaaaagaaagacatctacgcgccgttcaatattctgcctctcgatgcggccagtgcatcccagtccatcatgcagctggaggaggtatacgacttacaacaatgcagcctatttcctcaaaacaggaacaattgcattatgtactggttcaattaaagaaactgacgtggtcatcgaatgcatcattaacagataaaagcagcagtcgcagctctgcggtacacacggggtttgacctggccttctgcatttgagccggaaaggcagaaggggggtgagctcgatttgctcgattggttgagagctatgtttggctttcaggtctgctacccactccaggcaaaccaatttcgattggtccattgtattactataagctaacactagcttatcttcttgtgtgcagcgggacagtgtcaggaatcaacgggagcatttgattcttctcctcgctaatgtgcacattagacttgagccaaagcctgaaccacttagcaaggcacactcttctatcaatatttactttgacagcttgactttatgaatatcaattgataagcataagatcaatgggttttgcatgcataaaaatgtggtggtagcttctgacagaacaggatatttgcctgagtttctaatattttaaaaaaataaagttatttttcattggattagtaaccaattatttaccttcaacgttatgttgtgattgttggtgtaacttgccataacatacacatgcagtttaatttctttcttgatactactattttttatttccatattcttgacattagaatttgctggactggtgccactacttgcaaaaatgccagctgacttattggctttccaccacgaattcgattgattgaactttctgtatgcattattctgaagcaagtgcgtagctaaataatgttaattacaccctccatttcccatgctttgcttctctcctttttgttcatcgttgcttgatgattgatctcatccgttctttcacccctgaaacagctagatgaccgagctgttgatgtagtgatgaacaagttgttcaacaactacaagaagtggtgcaaatttttgtcacggaaacatagtttgaggtatataattccttaatcagtttcctctttatgtacattattgtgctgataatcttgcaactgcagaaatcctccaggtgctcaattacaggaagttcagcaacgcagaattttgtacctaggtctttatcttcttatctggggcgaatcagcaaatatccggtttatgccagagtgtctttgctacatttttcacaatgtaatttgcacattcttattatcatatcaagtaccaaatctcattgcaaaaatatatctttgaatgattcttctcaatgtgttcagatggcatatgagttgcatgggttgcttgctggaaatgttagtattgtgactggtgaaaatatcaggccatcttatggtggggatgaggaggctttcttaaagaaagtggtcacacctatctatcgtgtcatcagaaaggtactttgataaattaccattacctgaaattccaagttagtttgttctaaatataattgtggtggtttttcaggaggcaggaaaaagccaacatggaaaaactgcacattcagcatggtgtaattatgatgatctaaatgagtacttctggtctgtttacagccctattttctggtcacatgctgacagccttttcacactttctctgatagatcctactctgtttcaggacacctgattgtttctcactgggatggccaatgcgagatgatggtgacttcttcaaatccgtgcacgattcaaggcctgtagcagtggtacagttcgatataagtctgtcagtatctcttccaaagactttgattaggaggagaatactgacaaataactatttgtaggctggaagctcctcaccaaagggttctagtaaaggcacaggcaagacaaattttgtagagacaagatcgttttggcacatctttcgtagttttgaccgaatgtggaccttctatttgttggctctacaggtactgtgccaaaattttcgattggcttttttctctgtactatggtttttgatggtttgacactctgtgaatcttataatttttaaaccgaacaggcaatgttgatttttgcttggagtgaatattcagtgactcaaatccttcagaaggacctcttatattctctatcaagcatatttgtcacagcagcatttttacagttcctccaaagtatgtttcccatttcaaatacttgttttatgtacaaggcatttttctgatgcatgtaatatttccttttattttttgagaacctgaaatttttagtatgacaagtgatgaatattggcataatttagttccctttatgtatgtaataccttctgcttttgtcaatggcattacggtaagactatgttaagctaggttcccgcgatacagagcactttcacagcagaaagcaactggcaagaacattcatgtagatatctgcaactttaggatctcttctcatatgcattaaactagtgttactataccgagcagtcatgttcttgagatgctctctggtctggaattcttgtggttttaagagggttctggtgcaataacaaattcgtcatccaactgaaactgatattttctttaattttgatggcaggtattttagactttattctgaactttcctggccacattagatgcaagttcattgacgtcgtgagaaatattctgaagatagtagttagtgccgcgtgggctgtgattcttcccattttctatatcagaagtcaaacaaaagtcaatttaccactgaaaaatctggacagatggtttggttatgtgaaaggagtgccacaactatatatcctggctgtggcggtgtacctgatacctaatatgattagtgcaacgctcttcctgtttccgatgtttcgaaggtggatagagagctcggattggcatattgttagactgctactgtggtggtctcaggtattgaattcaatctattttatttgtttatgttctattatgtggaaaattacttatgcagcttatcctcattgtaaatattcatttcaaaatttctgctatgaggcaatttttaataaggtaatatttgataaaatggaactgtattttgtagaatgaatttgtcttgatatccttgccagcttattgtttgtcatagtatcctagagggttgagaaactactgataaaattgtaaactgtaacttgcaaaaagagaaaataatccaatgacttctgatgccagggcagagattatcctgctattttgtcattagtttgaaaaaaacattttatggttagttaaaaagttctcacatgcttgtgaaaattgatagttttcacttctctaacaatatgtgttcaactgaacacatttgctatcccagtaatgaaaatgatattgcaagggtacatatgcacgaaacagggtggaaaacgtgaaggcaatagattattttgtatgcaatgcgtggaagtaaaataactggatgaatttccctggatcataaggcgctgtacatttattcgtttttcatatttctttcttgtgcggcttgctacactacactacactaatggcaatgcccattttccttgttcttgctgtacacgctaattgtataaataactgcagaaacgaatttatgttggccgtggaatgcatgaaagtcaagctgctcttctgaagtaagttactctgttctatttttcttctgttagagctttattctgcagaaaacactcaattctcttctattcaactgagaaggtacacattattttggattttgctgctatgcgcgaagctttccttcagttactttgtccaggtaagttctatgcttagttatttgcaaacatgctttgacgagattaatctgaaacagtttaatttgcagatacaacctcttataaggcctaccaaggatataatgagtgttcataacattcgttatgagtggcatgagttttttccaaacggtaattccaatgctttttttttttgtgccgccttcattctggaaccctttttttactgatacttcgttgccttttcagcatcatataatatcgctgctatcctatccctctgggcccctgttctgttggtatgcacttatccagcctgctagtgtagtgcctatccagcttatgtattagctgaaaagtagcttcatttattcccgtttgtttcaaaactgcattctaaatcttggtttatcaactacaatgcttttattcttgtaggtctatttgatggatacacagatatggtatgccattttctctacaatatccggcggtatgtctggggcacttggacgacttggggaggtaatgataaatctgaactattctctgtaatctgttgttttgctttataatttagaacttataatgaccataagtgtagggcaccccaagattgatggatagctaaggggctttttctttatattgaggagtaaactgaacgtgtcgaggtctcagtcaattgcatgaaacaaatagctcgtactttataaacataacggcgggctatgtagatggtaatacagttttatgcagaatattttgtttgaggaagcttagcgaggtattttaataagtgaaaatcaccttttttgtttttgcagcctgagaattcagaataaactacattagattataatggtaattttaagtagataaatatggaagtgtattcacaaggcaaatgggatattcatttttaggaggatcctctgggagtcgcacttcagtcttgtttctgttatgctgccgtatttacaagaaaacctttttcatattcatgaaatgaagcaaaaaatgtattgctggtggcttggtgtatttatagtcggatattctcctttttaaccgtcgacatttttgtattagcactgccttttttactttgttattgccgtacagcgttgtgtaactttttctttttgcaagagttaagaagctgaacttcatactgttctggtttctgatggagttactacactcttgtaccagattcgaacactaggaatgctgagatcacgatttcactctttgcctggagccttcaatacatatttggtgccatcagacaaaggcagaaacagacgtttttcactctcaaagcgcttcgcagaggtaccaaatgacaataacgaaaattattgtcaagatttctcttataaccccccttaaaagttatgatataatgaagaatttaaagtacaggtttcccccaacaagagaactgaagctgccaagtttgctcaactgtggaatgaagtgatttgcagtttccgcgacgaagattttataagtgataagtgaggcccttagatcatgttcacctagaaaacattatcattgcaatgtagataatggaccttctgttatgcagggagatggacctattggtggttccatactcatcagacccgagcctaaaattgatgcagtggccgttgttcttgcttgctagcaaggtttggcagaacaaatttaatatgtccactctaccttgttacatgtttgtgttcggctcttactggaaatcattttgattgaaatttgcagatacctatagctttagacatggcagcacaatttagaccgagagacagtgatttgtggaagcgtatatgtgctgacgagtatatgaagtgcgctgtaattgaatgctacgagtcattcaaacttgttcttaatttagtggtggttggagaaaatgaaaagaggtatcttcttatacttccattttccactgtttcacgtatctctatgtgagaaagacattgatgttgtttgtcatagcttttaggtattcagttaatgataacactaggaaatactccctccgtcccaaaattcttgtcttagatttgtctagatacggatgtatctaacactaaaatgtaactagatacatccgtatttagacaaatctaagacacgaattttgggatggagggagtatatacttacatccggaatagacattgtgcactatttttcttcaaaaaaatcgttactagtactccctccgttcggaattacttgtcgcggaaatggatgtatttagacgtattttagttctagatacatccatttccgagacaagtaattccgaacggagggagtacctagtaggtttctatgattgtctaaggctcctctgttgacgaatccttgccacttttgagcaagacagggccacccaggaaatcatttgtttcgttccaatatgataaaatcattcttaccataaactgggaaacacgcaggtcagcacaagtatttttgaacatataaagtggtcagacatggctgaatatttgtagtttgaacatgcacgttttcattcgtagtagttgatgcaaaagatcaatacaaatatattactaaaaatctacaaccctatatgataatggggtttgagagttcaagattacaaatacattacttttaccaataaatatatatctggctagttgcgtatggcggcacatcatcactttcaaacttaagaatcaagatattccaaattgaactagggaggaggactgccaagcacctccattgtgcaatatgcatggaagggaaaccatgattagttgtaactgctaaatgtgcaacatgtgttagataggcagccttagtactattgaaggcatctgtgtccatctttcatgttttttttactgcattgttctttatcattgcatgctcactgttatcttgatcttctactgacatgtttgttcactaacttcaacaggattattgggattataatcaaagagattgaagctaacatcgcaaagaatacattccttgccaattttaggatgagcgcattgccagtcctttgcaagaagtttgtggagcttgtatccaccttggtaagcaatgttgttacctctactgaacaccaaccctattgaagattgcattgcttgatatttttttagacaagtaacacgttcgattattgctacgattatgtgatcacatctgcagaaagaaagagacgcctcaaaatttgataatgtagtgctattgcttcaagacatgctggaagtgatcacgagggatatgatggtcaatgagatcaagtaataccttttgcacaaattataatcatacatgtgccttgtcatagaaactggtgactattttttttaacatgtgttgtttacagagaactagctgaatttggtcatgggaacaaggatttagttccaagaagacaactttttgcgggcacaggcacaaaacctgcaattgttttcccaccaccaatttctgcgcagtgggaagaacaagtaataacatcacattcttatttggcttttgtaacaaagaaggttcactaacttcacctatctacagattaagcgcttgtaccttcttttgactgttaaagaatcagcaatggatgtgcctacaaatcttgaagcccgccggagaatatcatttttcactaattcgctattcatggagatgccacgtgcgcctagagtgcgcaaaatgctctctttcaggtttgtctcgtatgtaaactttcaacatatcacagtgttgtccagtccacttttctaaatacaccgcagtatcgaaaatcataatgtctagctaaattagctggattcattggagcctggcagctactggctaatggtccttttactgtgcttcttaaaaagaattatatctgcttgtcaagatatattttgggctgaattatggtatgttcttaactctgatcagtttgaaagaacagaaaacatgaatatttttgggcgtggaattgtgaatttgtgctagtcaggaaagaggaaagcaccattaagaccaaggagaagcttatcaatgttgggattttaactgatttttttgctgtttgatgaactcgtattctgaactaaatggcggggtggtttctaattttcacggtcagttgtttaggatttttttattacaggttattttgatcactgccatcctcatcgtagtcttaaaaaacttcttgctgtcatttgatgtgttgtttaagctaaaaatggaagtatgagtgtcctgatgccattatgtggtattgagttgcttttgaaactgtctttgagtctgccactctcattgtctcagcagatttgcatgccccttctcggtattaactacagagtcggagttttgtgtcttgaccagttaacccaatggcgccatgatcatactagaaccgaagttcatctacagttttgatcagaattcatttaaagttgcattatattacaactgattctgtactcatcagctcatgttcgcttgatggtaaacaaaatttataaacagaagtgttgaacatccacaatgtctggcagtggcactctgtaatcttgttacttgtacaagtacatatgtttccaccttaaaggaaaaatgcacctagatattctaaaaaaataacaagtggtgaacttccaggtggagacctgtacaacagaatgtgtgcgacccatctttaagtgcattcataatcacaaatcaacaacgttaacaccagaaatatattatcagttcacaacaacaaatatctgataaaccgtatggttaaatttgttctgtgatcataagagtttcagcgaaaaagattgggctctagatgattcatatgacacttgttcttcacagtgtaatgacaccatactacagtgaggaaactgtatattcaagaaacgaccttgatctggagaatgaggatggtgtatcaattatattctacctgcagaagatctttccaggttcctttcctatttgatgtgtttaatgcctacagttctttatgaatttgattgccagctttttgtcttctattcttgataatttttgttatatagatgaatgggataatttcatggaaaggattgattgcaaaaaagaaactgaagtttggggaaatgaagaaaatgttcttcaacttcgtcattgggcctctcttagagggcagacactctgtcgaacaggtacttcggccataccctttaaccttgtcaaatatggatcatttagctgattccgtgtttacatgtttttcttattgtgaatagtgagaggcatgatgtattacaggaaagctttgaagcttcaagcattcctagacatggcttctgaatctggtgagcttcttcaacttccaattcgagcattcctagacatgatgcatttagcattcctagacatgttcacaaatataagatgttttggatatttcaatatggactacatgtggactgaaatgagtgaacaaacacagtaagcttctattaataaagttagaacatcttatatttgtgaacggagagggtaccttttacaaatacttcctgattttatattgtagaactaggggagcatccgcaataggtgcaaaaagggggagtttttttcatgagaagagaactaggtctacatattatagcatctttttagaagttagacccaatcttattggacacttggaaggggtctatgcactgaggatgttctagaaggctataggggacttatacaaagtgtccaacatcaccctcttttgtttgcagagatactagaaggctataaagccattgcagatcccgcagaggaagagaagaaaagccaaagatctctgtcttctcagcttgaagctatagcagacatgaaattcacatatgttgctacgtgccagatctatggaaatcagaaacagtcgggtgatcgacatgcaacagatatactgaacttgatggtgcagtaagtgatctcgatgatctattctagaaattaatatacaacatttggccaagtgcgatacatcatgtctaccacaatgagcaaaatgttttcttgtataactctttggagactgtgtgtctcggttatgtttatatttagttcacatttaattgataatgagatgttccttgagggaaaattactgaattgcttcttttattcaaattgttatttccctctgtgcaaagtaatttcagttagaatttgaaactacagttatcctggtctccgcgtggcatacattgatgaagttgaggagagggatggtgagaaggtgcaaaaggtcttctattcggtgctagtaaaagctcttgacaatcacgatcaggtaatcattttacgtgaagcgagttcaaactttcattttggttctgatttaaaccttcaatactcagtagtgcgttatgtacttttttgtcctgtgaaggaaatataccgcataaaattgccagggccagcgaaattaggtgaagggaaacctgaaaaccaaaatcacgcgatcatttttacccgcggagaagctttgcaaaccattgatatgaaccaggtgaacttcatggttatagtacctttttggtaagtaggttgcattctgtcttttgtacttatcaatgctgtttaggacaattatttggaggaagctttgaaaatgcggaatttgctggaagaattcaatgagaaccatggtattcgtcctccaacaattcttggagtacgtgaacacatattcaccggaaggtgtgttttaagctttgcagtaggttttacttagttttctttgtcaaaattgcaaatcaatgcctaacatctgacattgctggattgtagtgtgtcatctcttgcctggtttatgtcaaaccaggaaaccagctttgtgacaataggacagagggttcttgccaatccattgaagtaagtctgaatatactttgatatgtcctatttgaattaagcgcaatccatagttatcatatttatatgctgcaatatgagtagggagtgctgagcatctatggtgactatctcctggatgagcgcttatgtttttttttatcagctcttgaaatgcacacacatgtttgttggagattttagaggcagtaaggcaataaatattaaaacaaccaagtgctatttcctggaactttcctggcataaaatcttttgaagctaaacaatgtcatcaatttaaagtgtatattgtggtctaagtgctgtatatctgacatgctgtttcctgaaactttcctggcatcaaagcttttcaagctaaacaacgtcgccaatttaaagggtgtattattgtgtatgtgctgtatatctgacatgctgtttcctgtcagtaaagcttttcgagctaaaaaatgtcgtcaatttaaaatgtgtattatatctactccctccgttcctaaatataagtctttggagagattccactatgaatcacatacggatgtatgtagatgcattttagaatgtagattcatccattttgctccgtatgtagtccatagtggaatctctacaaagacttatatttaggaacggagggagtaagtgataaatatctgacatgctgtttcctgaaactttcctggctgagcttttcaagctaaacaatgttgttaatttaaagtgtgtggtatggtcattggtcattgctatgtatctgacattctcttttctgggcagggtacgttttcactatggacatcctgatgtgtttgataggatatttcacattacaagaggtggaattagcaaggcttcctgtggtataaacttgagtgaagacatttttgctggtatgtacttttccacctattctaactgttacctgtggatttttgagggaaatttaagaatggataggtccctaggacatccacatcctcgtatatgtgactcaaactgggtttgacaactgattcacacatgggccattatatgggcctcagacagactactctaaacttgattaagacactgatgctactcttatctaacacattaactcacattccaacatttcccatttctgctcttggacaacacaaacttaaattttctttttcaggtttcaactcaactctgaggcgaggaaatgtcacccatcacgagtacattcaagtcggaaaaggacgtgatgttgggttgaatcaaatttcactctttgaggccaaagtggcgtgtggcaatggagaacaagtgcttagcagagatatctaccgtttgggccaccgctttgacttcttccgaatgctctcatgttacttcacaactgtgggattttatgtcagctcaatggtacaaaacatctacctgcatcacatttgtcttgatttgccatcgtccatgttttttgatgttcttattactgtgcagatggttgtcataatagtatatgttttcttgtatgggaggctttatttagccttaagtggacttgagtttgcaattatgaagcaagcacgaatgagaggcaaccgtgctcttgaggcagccatggggtcccaatctattgtgcagctaggtctattgatggccttacccatgtttatggagatcggactggaaaggggttttagaagcgccctgggggatttcatcatcatgcagctacagctatgtgcagtattctttaccttttccctcgggacaaaatcacattattttggccgcacaatcctccacggtggtgcaaaatatagagcaactggcagaggctttgttgttcgccatgtaaagttcgctgaaaattacagaatgtatagcaggagtcactttgtgaaaggacttgagctcatgttactacttgtagtgtatgagctctatggtgatgtggcgacagattccacggcctatgttcttctgacatcatctatgtggttcttggtaatcacatggctgtttgctccattcctcttcaacccatcaggatttgaatggcaaaaggtggtggatgattgggatgattggaacaaatggataagcagccgtggcgggattggtgtgccggccaataaggcctgggagtcgtggtgggaagaggagcaggaacatctgctgtcaacaggcataatcggccgcatatgggaaatcatattatctctccgattcttcatgtttcagtacggtatcatgtaccatctgaatatctctaatggcaacaaaagcatatcagtaagtcatcctttatttttgctagtattttacaactctactcgaactaaatggatttcatgagactgattacatgatctttttgattgtttataatcactgtttactgatacaatttagtgactgtcccttcccaacttgattttgtggcttcagatttatggtctgtcttggctggtcactgtagcagtagtgttggtcctcaaggtaaatttcatttgcttgctgttgatgaaatcaataagtatatattggttggcgtatgcctctagtttatgtccttgttatgctgctgatatgctgccatttccttaggtggtatctatgggaagaaagaaatttagtgctgacttccagcttatgttccggctcctcaaattgttcttgttcattggatctgttggaactttggcgattcttttcacccttctgcaccttacagttggtgacatattcgccagcttccttgcctttgcacccacaggatgggccattctgcaggtacgtcatcactcatcagcaccaaagctttccttttgttttgttttaaggttttactcccagcttatcacgtgcgaggactgaggagtgaggagcagtatcaattcatagggagagagaaacgagagaattttgatcgagttaaagttgctattatcgaaattgacatctttcactggctctaatccgttcggcatcattgcaacagatatcacaggcaagcaagccagtggtgaaggcttttggtctgtggggatctgtgaaggccttgtccagggggtacgagtaccttatggggatcgtgatcttcgtgccagtggcggttctggcatggttcccttttgtctcggagttccagacgaggctgctattcaaccaggcattctcccgaggcctccaaatctctcgcattttggctggcggaaagaagcaaaactgaggcgagtctaggagatgggagatgttccatcacagtaatcacacagggtagacggaggcagaaattagctcgaggttcgttgttggaggggggcatcatatggctgctaacatactgacactttcagaagtttcttagtcttgtacacacagggcagttttccttaggcattttccatgtatatctcatgctaatacactcttacctctgatactagattgtacgttgcttgtatagatagatacatgcccccacaacagttgcgacaaaacattacggtgcttttagaggcaaagatgaaactgattttttgtgcatgaagcaacaaaacagttcggtctttctagattgagagatcaaatcgatttttgtgcatgaagatgtttgtgttgtgctgtacggtgtaccagtcagttccctgctttgtgcttgtgttgtctgaaactctgaatttaggctgatgtttgaacgcgctggcatttcccagctggaacctctgctttctataaaaaacaggcctgtatggcctttctaaaaatagtctgaattgatattacgtgagatctgtttttctagaatacaagagtaccttgcactggttcggactgttgcagcatatgagcataacataagttggacggctttttgcgttatgtttcatgcgtagacaaggataatgggacagaggttgtgaattatgacggtaggtacaactttacattaggtgaaggctgacatgagttaagatggaggacctgagtctgttatccttccagctttaagcaggccacctcacgtaatctgaattcacaaatgagctgaagcaacatcgattgcaatcataggagaccgatacagctttcagcttgtccctgcccgatgtctaatgattctccaagcgcagactgccaattaagtacacacgaggtgactgaaatcccacaacgacggtcatgatatcacaggaaaatttatatttttctgctttttaaaagttttttttctgcttttttgtttcccagctattgctgcattttggttcgagccatcatttctacggtcgggctgcttttgtagggtcagcgtgttttccgcgacaaattctcattgtgcctatcccgtcccccttcgcccactaggcaagaactctcagtgtcgtgactaggttttgacgtgcagagagtacacgacgcgtgatcgtgaggccaacacccaacagtatcctaggccctaacgcatggaaaccaagtgaccgagcgagaagagaatggaggcccagaatctttggtggaaagaaacgacgtggttgtcatgtacttatgctgattacaaaattgcaaagtctggtcagaaccatcatttggtcggcattgagagttttccttctttttgaatggacaggaattgagagttgatggtgcatggtgccatttaagcgatgttcaaacgggagctgtaaatcatcccgcattcggaaattattaaaccaatggcagttcatgggcaggcaaagccctgcacgaatcttggcggctcgcatcctctattgcagctttgagtggccgtagatttgcaaaagcaatggctaacagacacatattctgccaaaccccaagaaggataatcacttttcttagataaaaaagaacagaccaatatacaaacatccacacttctgcaaacaatacatcagaactaggattacgccgattacgtggctttagcagactgtccaaaaatctgttttgcaaagctccaattgctccttgcttatccagcttcttttgtgttggcaaactgcgcttttccaaccgattttgttcttctcgcgctttcttcttaggctaaacaaacctcaccgtgcacgcagccatggtcctgaaccttcacctcgtccctataaaagcctagccaaccttcacaatcttatcatcacccacaacaccgagcaccacaaactagagatccgaattcctgcagcccatcccaccatgcggaagttctccgaaatagctactcagcggtgtggtaatcgatcaatggcgctatcagctcctcccagtcaggaacagccgtcggggaagcaattcggctaccagctcgctgctgctgtgaggagcatcaactggacttatggcatattttggtccatttccgccagcccgcgcccaggccactcctcagttctggcgtggaaggatgggttctacaacggcgagataaagactagaaagattaccggctcgaccactacggagcttacagcggacgagcgcgtcatgcacagaagcaagcaactgagggagctctacgaatcgctcttgcccggcaactccaacaaccgggcaaggcgaccaaccgcctcactgtcaccggaggatctcggggacggcgagtggtattacaccataagcatgacttacaccttccaccctaatcaagggttgccaggcaaaagctttgcgagcaatcaacatgtttggctgtacaacgctcaatacgcaaacaccagagttttcccccgcgcgctcttagcaaagacaatcgtttgcattcccttcatgggcggtgtgcttgagctcggaacgtcggatcaggtgttggaggacccgagcatggtgaagcggatcagcacgtctttctgggagctgcacttgccgtcatccttggagtcgaaggatccgagctccagcacatcagcaaacgataccagggaggccaccgacatcatcttgttcgaggatttcgaccacaacgacacagttgagggggtgatctctgagcaaagggaggtccagtgcccgtccaacgtcaatctggagcgcctcacaaagcagatggacgagttccacagccttctcggtggactggacgtgcatcctctcgaagacagatggatcatggacgagccctttgagtttacgttttccccagaagtggcgccggctatggatatgccgagcaccgacgatgtcatcgtcactttaagtaggtccgaaggctctcgtccatcctgcttcacagcgtggaagggatcatccgagtcgaaatacgtggctggccaggtcgttggggagtcacagaagttgctgaataaagttgtggctggtggtgcatgggcgagcaattatggcggtcgcaccatggtgagagctcagggaattaacagcaacacccatgtcatgacagagagaagacgccgggagaaactcaacgagatgttcctggttctcaagtcactggtcccgtccattcacaaggtagacaaagcatccatcctcacagaaacgataggttatcttagagaactgaagcaaagggtagatcagctagaatccagccggtcaccgtctcacccaaaagaaacaacaggaccgagcagaagccatgtcgtcggcgctaggaagaagatagtctcggccggatccaagaggaaggcgccagggctggagagcccgagcaatgtcgtgaacgtgacgatgctggacaaggtggtgctgttggaggtgcagtgcccgtggaaggagctgctgatgacacaagtgtttgacgccatcaagagcctctgtctggacgttgtctccgtgcaggcatccacatcaggtggccgtcttgacctcaagatacgagctaatcagcagcttgcggtcggttctgctatggtggcacctggggcaatcaccgaaacacttcagaaagctatataggcaagatgttttttgacattagtgtagtgctaaaaccgtcttatatttgggacgaagggagtacttagcgacgcaatctacaaaaaatcatgagttgggctctatagtcttcttcacccaggaatcaggtcggactagtgtgaattactgtacaccaaaaaaaaattccgaaataattactgaacacgtcatgacctcgccccaaaaaatatccagatctatattccgcctatcaattaagcacgaagtttgaagggagtgcctagaactcatttagatgagatataatttggtctcattcaccttgaaaacgaaaacaaaaacaacccacgtcagcacacacgcatcttatagcatcacatccaatggctataaaaggtgaatgacagcaaattatacctcatctagatgagttctagcaaaactgtaatttgaagccgactatgctgcccgaccctactcactactacagaaatgcctagctagcggtggcggcactaagagcccattcggattctttccagcttcctgcgatgccagccacagccagcttctgatgggatgggagtagcgtttcgttcgacagcagagggtagctctgaagttcctattctctagaaagtataggaacttcggtcgagtcattcatatgcttgagaagagagtcgggatagtccaaaataaaacaaaggtaagattacctggtcaaaagtgaaaacatcagttaaaaggtggtataaagtaaaatatcggtaataaaaggtggcccaaagtgaaatttactcttttctactattataaaaattgaggatgtttttgtcggtactttgatacgtcatttttgtatgaattggtttttaagtttattcgcttttggaaatgcatatctgtatttgagtcgggttttaagttcgtttgcttttgtaaatacagagggatttgtataagaaatatctttaaaaaaacccatatgctaatttgacataatttttgagaaaaatatatattcaggcgaattctcacaatgaacaataataagattaaaatagctttcccccgttgcagcgcatgggtattttttctagtaaaaataaaagataaacttagactccaaacatttacaaaaacaacccctaaagttcctaaagcccaaagtgctatccacgatccatagcaagcccagcccaacccaacccaacccaacccaccccagtccagccaactggacaatagtctccacacccccccactatcaccgtgagttgtccgcacgcaccgcacgtctcgctgcccaaaaaaaaaaaaggaaggaaaaaaaggaaaaggaaaaacagcaggtgggtccgggtcgtgggggccggaaacgcgaggaggatcgcgagccagcgacgaggccggccctccctccgcttccaaagaaacgccccccatcgccactatatacatacccccccctctcctcccatccccccaaccctaccaccaccaccaccaccacctccacctcctcccccctcgctgccggacgacgagctcctcccccctccccctccgccgccgccgcgccggtaaccaccccgcccctctcctctttctttctccgttttttttttccgtctcggtctcgatctttggccttggtagtttgggtgggcgagaggcggcttcgtgcgcgcccagatcggtgcgcgggaggggcgggatctcgcggctggggctctcgccggcgtggatccggcccggatctcgcggggaatggggctctcggatgtagatctgcgatccgccgttgttgggggagatgatggggggtttaaaatttccgccatgctaaacaagatcaggaagaggggaaaagggcactatggtttatatttttatatatttctgctgcttcgtcaggcttagatgtgctagatctttctttcttctttttgtgggtagaatttgaatccctcagcattgttcatcggtagtttttcttttcatgatttgtgacaaatgcagcctcgtgcggagcttttttgtaggtagacgataagcttgatgatccgtcgatcgtttcgcatgattgaacaagatggattgcacgcaggttctccggccgcttgggtggagaggctattcggctatgactgggcacaacagacaatcggctgctctgatgccgccgtgttccggctgtcagcgcaggggcgcccggttctttttgtcaagaccgacctgtccggtgccctgaatgaactgcaggacgaggcagcgcggctatcgtggctggccacgacgggcgttccttgcgcagctgtgctcgacgttgtcactgaagcgggaagggactggctgctattgggcgaagtgccggggcaggatctcctgtcatctcaccttgctcctgccgagaaagtatccatcatggctgatgcaatgcggcggctgcatacgcttgatccggctacctgcccattcgaccaccaagcgaaacatcgcatcgagcgagcacgtactcggatggaagccggtcttgtcgatcaggatgatctggacgaagagcatcaggggctcgcgccagccgaactgttcgccaggctcaaggcgcgcatgcccgacggcgaggatctcgtcgtgacccatggcgatgcctgcttgccgaatatcatggtggaaaatggccgcttttctggattcatcgactgtggccggctgggtgtggcggaccgctatcaggacatagcgttggctacccgtgatattgctgaagagcttggcggcgaatgggctgaccgcttcctcgtgctttacggtatcgccgctcccgattcgcagcgcatcgccttctatcgccttcttgacgagttcttctgagcgggactctggggttcgaaatgaccgaccaagcgacgcccaacctgccatcacgagatttcgattccaccgccgccttctatgaaaggttgggcttcggaatcgttttccgggacgccggctggatgatcctccagcgcggggatctcatgctggagttcttcgcccacccccggatccccgatcgttcaaacatttggcaataaagtttcttaagattgaatcctgttgccggtcttgcgatgattatcatataatttctgttgaattacgttaagcatgtaataattaacatgtaatgcatgacgttatttatgagatgggtttttatgattagagtcccgcaattatacatttaatacgcgatagaaaacaaaatatagcgcgcaaactaggataaattatcgcgcgcggtgtcatctatgttactagatcataacttcgtataatgtatgctatacgaagttatcaacggtgacgactacgactctagggcactagtccttacgggcacatgcatgaagacttcccgactgtcatcgtatggtcaagccggctacagtaggggaacaacggtagtggtcattcgatggtgaagaggcgttctttgtgggcaagccaaatgattctgatctattatcaatgttcaccagaaaaaacaaagcaccttgttgtttcaattttgcgaaaaatgattcaaatctattatcaatgttcaccagcaaaaaagaaaaataaagcaccttttgctttgctcttgagcaaaaattcttttgagtggaaaaaatacaccctgttgtttctctttgcagccaaggacaaagcataggttacgatcacatcttggtcaacatatgtggccgttcaagatcatccatgcatgcatttgtattggtggagctagacaatctatttttagcttgtcttagaaaaaaatctatcattagctcgaattttctggaaaaaattgtaaggactcccttaaatttctatcggtattcctgatgaactttccacgtggcaacaagcagtagagagagtagtcgcaaaagagtaaaaatagaagacagaaaaattagtggaaaagggtacgcatgcgaaccgtggaagaagctgccgcctccgctcctctccatcgacgacgaaaccgagcacctcccagctcgacgagatcgggtgcccgtcggtgcgatccctctgctgcagcggcatggcggagccggaggacggcggcgaggtcgcccctcctgaggcggcggcggccgcgacgagcgcggccgcccattcgtctccccctgctaaggaggagccggcggcagcggcagaggcaaagccggccggctccggcgaggcggtctccctcaactacgaggtccgaaatatctgaaactcttttatgaatgtttgtttgatacgtagtacggtgcttgtcctatataatgctgctatgatgtgaacttggtttgcaagaaattgccatgtttgaagtgtttggtcagtgccgccaatgttatgtcaaatttcgtattgccggcgatgatggtgtcaattcaattaagcgatgactttgattgttctcacatgaaccgaaaatgtaaagatgccaacgttggtcgtgcgtttttttcaaaaaatattgtttgagaggctttgtgtgggaaatgtgttcctttcttggggatgtcaaatgctgaattgtgattccatttcagttctggttctatttcattgattggtttatccaattgcgaattattcggcaagtttataagacatgcacctttttttgttctttatatatttgggtgagtgaattataacacgatggtgtcaatcaaaatgctttttattgggtgagtgaattgtgaataatcttaatgccagtataggtagcaagattttactgaatgatgtgtaatcatacggagaaagggacattttctttgtccagattatgaagaactgatcatatttctattcccatgaaccatgctattgatctccattgcaattattaatttccaaaaatgaagttcaaacttagcttaatacatggagaattccaaccgtcatgctttctcgggtttattacaccaagttatttttttgcgggtttattacaccaagttcgtttatacgtacatcgatcggtaacaggaagcgagagctctcttaggaaggctggaatttcagaaaggcaatgtagaagatgcactttgtgtgtttgatggaatagaccttcaagctgccattgagcgcttccagccatcatcctcgaagaaaacaacagaagctactcttgttctcgaagccatttacttgaaagcattgtcccttcagaagctaggaaaatcaataggtaacaaaattgctttataccgttgtttaagtttaaaacaaattgctttaattgtgttttacaaaaataaattatcatttggaagttgttctttttttagcttattctttgacttgtaacaaattactgaaatacctgttgaacatgcagaggccgctaaacaatgcaaaagcgtcatcgattctgttgaaagtatgttcaagaatggcactcctgatatcgaacagaagctacaagaaactatcaataaatctgtggaacttctcccagaggcctggaaaaaagctggctctcttcaggaaacatttgcttcgtacagacgcgctcttctcagcccgtggaacctcgacgaggaatgcattgcaaggattcaaaagagatttgctgctttcttgttgtatggttgtgtggagtggagtccgcccagctctggttcaccagctgaaggcacttttgttcccaagacaaatattgaggaagccattctactcctcacaacagtattgaagaagttttatcagggaaagacccactgggatccctcggtgatggaacacttgacctacgcattgtcgatttgcagccggccttctcttattgcagatcatctggaggaggttctacctgggatatatcctcggacggagagatggaacacactagcattttgctactatggtgttgctcagaaagaagtcgctctaaatttcctgaggaagtccttgaataagcatgagaacccaaaagatacaatggcattgctgttagccgccaagatatgtagcgaggactgccgtcttgcctccgagggtgtcgagtacgcaagaagagcgattgcaaacacggaatcattagatgttcatctgaagagcactggcctccatttcttggggagttgcctgagtaagaaggccaagattgtttcatccgatcaccaaagagctatgttgcacgcagaaactatgaagtcccttacggagtcgatgtctcttgaccgctacaacccaaacctaatattcgacatgggagttcaatacgctgagcagcggaacatgaacgccgcgctgagatgtgccaaagagtttgtcgacgcgaccggtggagcggtctcgaaaggttggaggtttctagccctagtcctctccgcacagcaaagatactccgaagcagaagtggcgaccaatgccgcgttagacgagaccgcaaagtgggatcaagggtcactgctcaggataaaggctaagctgaaggtcgctcaatcgtcgcccatggaggcggtggaggcataccgggtcctccttgctcttgttcaggcccagaagaattcgcctaaaaaagtggaggtttgttttcttaatcaaatgcagcaaaaaaaaagtaccatccgtatactatttttctcttggcactttctccattagttcacataccgatgcttcagggagaggctggtggagtaaccgagttcgaaatctggcaaggtcttgcaaatctgtactccggcctctcacacaccagggacgccgaggtatgtttgcagaaagccacagccctgaaatcgtactccgccgcgacactcgaagccgaaggtgagccgaaagctcaggtcaccaaacccttacaaaatttcaccccgatcgatgtacgagtcgatgcaatgcaatgcaggttacatgcacgaggtgcgcaaggagagcaaggaggcgatggcggcctacgtgaacgcctcggcgacggagctggatcacgtgtcgtccaaggtggccatcggggctctgctctccaagcaggggggcaagtacctcccggcggcgagggccttcctctcggacgccctgagggtcgagccgacgaaccggatggcgtggctcaacctggggaaggtgcacaagctcgacgggaggatttccgacgccgccgactgcttccaggcggcggtgatgctcgaggagtcggatcccgtggagagttttaggacgctctcatgagattatcacaacatacaggaactccttactttttctaccctccacattactcctctactctccttgtttctctctcttgttgtagttcaatgcatgtaaagttaaccgatgtgtataggcacaattgttttgcatatttatttattttgccgtgggacctgtatttgctcatggaaagtgtgatgctttcagaaaatgcaagtgtgatggcagctgaactgttacttgaatttcgcttttacttgcactgttttaattttgtatgagaatgatgacgccaaagccttgagttaacagcgctatttaatttacacttcacactgcacactctctatactattgatagcctgggcttattttttgttgccctctatacattctgcatagccatttttttctcttttttttgcgagggtaaagagttttgatagtaattgtggacttatcaggaagctgaacatatatagcaaatgtattgtaaagatggacctgccctatgctgttcttcatcttggcggaggaccggcggtggggagtggtttcggggaggccggggcggcaaggcggcacgggagcgctgccggctgcgggcggcggagggaagttcctattctctagaaagtataggaacttctggcaggatatataccgttgtaa

SEQ ID NO: 222 - DNA, 2535 bp, Triticum aestivum
  source 1..2535: mol_type = unassigned DNA
atggtgcgccgcgggacgttcccgctggcgctgctggccgtgctggcgacgctgacggccgtggcggggcaggggaagccggtcacggacaacggctcgggcggcgcgtcggggccggccaagttcacgcccaaggacgccttctacatcgactgcggcggcacggccgccgccgacaccaaggacggcaagtccttcaagaccgacgcggaggccaacagcctgctctccgccagggacaacatcaaggtcgccgacgacaaggccgacgtgccgtcgcacctctaccgcagcgcgcgggtcttcaaggaggaggccgtctacaacttcccgctcacggcccccggctggcacttcatccggctctacttcttccccatcaagagcggggaggccgacctcgcggcggccacgttcgacgtgaccaccgccgtgaacgtccttctccatggcttcaccgccgaggcgaaggcggtcatgaaggagtacgtcgtcaacgccacggagaacaagctcgagctcaagttcaccccgcagtcgggcgcggcgttcatcaacgccatcgaggtcgtcaacgcccctgacgagctcatcagtaagacggccctgacggtgtcgccgctagccgagacaagcgggctgtcagaggctgcctaccaggtggtgtgccggctcaacgtcggtggcccgcccatcggccccgtgaacgacacgctcggccggcagtgggaggacgacgggcagtacctgaaccccaaggaggccggggcggaggtgtcggtgccgacgagcgcgatcaagtaccccgacgcgttcccggcgaccaagctcgtggcacccacggcggtgtacgcgaccgcccgccacatggctgaatccggcgtcgcgaaccagaacttcaacgtgtcgtggaaggtggacgtggacccgtcgttcgactatctcgtccgcctcttcttcgccgacattataagcacgtccgccaacgacctatacttcaacgtgtacatcaacggccgcaaggccatctccgccctggacctctccaccatcaccggcgacctggccgcgccctactacaaggacttcgtggtgaactcgtcggtcaataccgacggccacatcatcatcgacgtcgggccgctagggcaggacacgggccgcaacgacgcgctgctcaacggcgcggaggtgctcaagatgaccaactcggtgggcagcctggacggcgagtacggcgtggacggccggatggtggacgacggcagcggcacccgcaaggtggtggcggccgtggggttcgccatgatgttcggcgccttcgccggcctgggatgcatggtggtgaagtggcatcggcggccgcaggactgggagcggcgcaacagcttctcgtcgtggctgctgccgatccacacgggccagtccttcagcaacggcaagtccaagagcggttacaccttctcctccaccgcggggctgggccacttcttcaccttcgcggagatgtcagaggcgaccaagaacttcgccgagagcgccatcatcggcgtgggagggttcggcaacgtgtacgtgggcgagatcaacgaccccgacgaggagggctccaggatcaaggtggccatcaagcgcgggaacccgtcgtcggagcagggcatcaacgagttcaacaccgagatccagatgctgtccaagctccggcaccgccacctcgtctccctcatcggctactgcgacgagggcgaggagatgatcctcgtctacgagttcatgcagcacgggcccttccgcgaccacatctacggcgggcccgagggcctgcccacgctctcctggaagcagcgcctcgagatctgcatcggcgccgccaggggcctccactacctccacaccggcaccgcgcacgggatcatccaccgcgacgtcaagaccaccaacatcctcctcgatgacaagttcgtggccaaggtggccgacttcggcctctccaaggacggccccgggatgaaccagctgcacgtcagcaccgccgtcaagggcagcttcgggtacctcgacccggagtacttccggtgccagcagctgaccgacaagtccgacgtctactcattcggggtggtgctgctggagacgctgtgcgcgcgggcgcccatcgacccgcagctgccgcgcgagcaggtcagcctcgccgagtggggcctgcagtggaagcgcaagggcctcatcgagaagatcatggaccccaacctcgccggcaaggtcaacccggagtcgctcgccaagttcgccgagaccgccgagaagtgcctctgcgagttcggcagcgaccgcctctccatgggcgacgtgctctggaacctcgagtacgcgctgcagctgcaggagtccaacccacccgagggcgccagcgacgccgacgacgccgacgcctccatcgtctcctccgccagcggcgtcaccaccgtgcccgaccaatccaccacctccgccaacgagctcttcgcgcagctcgccgacatgaagggcaggtga

SEQ ID NO: 223 - protein, 844 aa, Triticum aestivum
MVRRGTFPLALLAVLATLTAVAGQGKPVTDNGSGGASGPAKFTPKDAFYIDCGGTAAADTKDGKSFKTDAEANSLLSARDNIKVADDKADVPSHLYRSARVFKEEAVYNFPLTAPGWHFIRLYFFPIKSGEADLAAATFDVTTAVNVLLHGFTAEAKAVMKEYVVNATENKLELKFTPQSGAAFINAIEVVNAPDELISKTALTVSPLAETSGLSEAAYQVVCRLNVGGPPIGPVNDTLGRQWEDDGQYLNPKEAGAEVSVPTSAIKYPDAFPATKLVAPTAVYATARHMAESGVANQNFNVSWKVDVDPSFDYLVRLFFADIISTSANDLYFNVYINGRKAISALDLSTITGDLAAPYYKDFVVNSSVNTDGHIIIDVGPLGQDTGRNDALLNGAEVLKMTNSVGSLDGEYGVDGRMVDDGSGTRKVVAAVGFAMMFGAFAGLGCMVVKWHRRPQDWERRNSFSSWLLPIHTGQSFSNGKSKSGYTFSSTAGLGHFFTFAEMSEATKNFAESAIIGVGGFGNVYVGEINDPDEEGSRIKVAIKRGNPSSEQGINEFNTEIQMLSKLRHRHLVSLIGYCDEGEEMILVYEFMQHGPFRDHIYGGPEGLPTLSWKQRLEICIGAARGLHYLHTGTAHGIIHRDVKTTNILLDDKFVAKVADFGLSKDGPGMNQLHVSTAVKGSFGYLDPEYFRCQQLTDKSDVYSFGVVLLETLCARAPIDPQLPREQVSLAEWGLQWKRKGLIEKIMDPNLAGKVNPESLAKFAETAEKCLCEFGSDRLSMGDVLWNLEYALQLQESNPPEGASDADDADASIVSSASGVTTVPDQSTTSANELFAQLADMKGR

SEQ ID NO: 224 - DNA, 4506 bp, Triticum aestivum
  source 1..4506: mol_type = unassigned DNA
caaaggagccaaaacgaagcgagttcatcggagtagtggacgggggcgcctctttggtagaactatctaccctgaataccaagagattctcaagcgaacaagagttagtaagactgctatttctaacagtttttcttaatccctgcaccaaaaaacagtttttcttaatagtcttgctaaatctctgtcgaccaagtcttcgttatgtctcgaccgatgctatagtcgtgagatcttatattgagatcatgctaaattatcctttcagtttttcttttttgtttatacatgttatgtcacttgcagtcgactgaaaccttgatacactttctttttcttagtataaattgctggtttcacaatgggtgatgaaagaaaacctcaaaactagcacaagctccaatcatgcatggtcaccgtcgatcgttcaggcagcagcaacaaagacaagctccaagaatagccatgtccagttggtctcgtgcagaatgacttgcgtcaatggtggacgagcccccaaacatagcacgccgacgcccgggtcaaaccggcttaaacttggcatggcgccacccaccaccgcttaacccccgcccatttctccctccccctcaagtctcctccgcccccttccctctcctccgattggccccgcccaaccagagagagggcgagagggcgccaccccagccaggccaccacaataacaaaaatcagcacgacgtccccggcgtcgggcgctgctcgtcgaggtggcggcggcggcggcggtgctgacgtgaccggcggcacaacggcagcgtggcggcgagggtgacgaggagaagcaccgcgcccaagatggtgcgccgcgggacgttcccgctggcgctgctggccgtgctggcgacgctgacggccgtggcggggcaggggaagccggtcacggacaacggctcgggcggcgcgtcggggccggccaagttcacgcccaaggacgccttctacatcgactgcggcggcacggccgccgccgacaccaaggacggcaagtccttcaagaccgacgcggaggccaacagcctgctctccgccagggacaacatcaaggtcgccgacgacaaggccgacgtgccgtcgcacctctaccgcagcgcgcgggtcttcaaggaggaggccgtctacaacttcccgctcacggcccccggctggcacttcatccggctctacttcttccccatcaagagcggggaggccgacctcgcggcggccacgttcgacgtgaccaccgccgtgaacgtccttctccatggcttcaccgccgaggcgaaggcggtcatgaaggagtacgtcgtcaacgccacggagaacaagctcgagctcaagttcaccccgcagtcgggcgcggcgttcatcaacgccatcgaggtcgtcaacgcccctgacgagctcatcagtaagacggccctgacggtgtcgccgctagccgagacaagcgggctgtcagaggctgcctaccaggtggtgtgccggctcaacgtcggtggcccgcccatcggccccgtgaacgacacgctcggccggcagtgggaggacgacgggcagtacctgaaccccaaggaggccggggcggaggtgtcggtgccgacgagcgcgatcaagtaccccgacgcgttcccggcgaccaagctcgtggcacccacggcggtgtacgcgaccgcccgccacatggctgaatccggcgtcgcgaaccagaacttcaacgtgtcgtggaaggtggacgtggacccgtcgttcgactatctcgtccgcctcttcttcgccgacattataagcacgtccgccaacgacctatacttcaacgtgtacatcaacggccgcaaggccatctccgccctggacctctccaccatcaccggcgacctggccgcgccctactacaaggacttcgtggtgaactcgtcggtcaataccgacggccacatcatcatcgacgtcgggccgctagggcaggacacgggccgcaacgacgcgctgctcaacggcgcggaggtgctcaagatgaccaactcggtgggcagcctggacggcgagtacggcgtggacggccggatggtggacgacggcagcggcacccgcaaggtggtggcggccgtggggttcgccatgatgttcggcgccttcgccggcctgggatgcatggtggtgaagtggcatcggcggccgcaggactgggagcggcgcaacagcttctcgtcgtggctgctgccgatccacacgggccagtccttcagcaacggcaagtccaagagcggttacaccttctcctccaccgcggggctgggccacttcttcaccttcgcggagatgtcagaggcgaccaagaacttcgccgagagcgccatcatcggcgtgggagggttcggcaacgtgtacgtgggcgagatcaacgaccccgacgaggagggctccaggatcaaggtggccatcaagcgcgggaacccgtcgtcggagcagggcatcaacgagttcaacaccgagatccagatgctgtccaagctccggcaccgccacctcgtctccctcatcggctactgcgacgagggcgaggagatgatcctcgtctacgagttcatgcagcacgggcccttccgcgaccacatctacggcgggcccgagggcctgcccacgctctcctggaagcagcgcctcgagatctgcatcggcgccgccaggggcctccactacctccacaccggcaccgcgcacgggatcatccaccgcgacgtcaagaccaccaacatcctcctcgatgacaagttcgtggccaaggtggccgacttcggcctctccaaggacggccccgggatgaaccagctgcacgtcagcaccgccgtcaagggcagcttcgggtacctcgacccggagtacttccggtgccagcagctgaccgacaagtccgacgtctactcattcggggtggtgctgctggagacgctgtgcgcgcgggcgcccatcgacccgcagctgccgcgcgagcaggtcagcctcgccgagtggggcctgcagtggaagcgcaagggcctcatcgagaagatcatggaccccaacctcgccggcaaggtcaacccggagtcgctcgccaagttcgccgagaccgccgagaagtgcctctgcgagttcggcagcgaccgcctctccatgggcgacgtgctctggaacctcgagtacgcgctgcagctgcaggagtccaacccacccgagggcgccagcgacgccgacgacgccgacgcctccatcgtctcctccgccagcggcgtcaccaccgtgcccgaccaatccaccacctccgccaacgagctcttcgcgcagctcgccgacatgaagggcaggtgatccatccatcttctgcatcgatgcatgatccatacctccatgcgtcgccgtcagtcctcaccgatcgagcagccatgagcagcaccgccgtagttcgtcaatccgtgcgcgcgccttctgcatgcatgctagtccatgcatgcatccatggtggaacggatgaaggaaggatccgatcatcataactcaaaaccaaacgaggtcgatcgaagagtgtatatgtgtgtaatgtatgtatgtgtctcaatcgcgtttactgatggcagaaaattccaaaatgtataccgcaactgtatgtaaaatcatggcgtcaattacactttgtctcacaaaaagtgttgattttgttagcatgcattcagctcagctcatttctcttttttccccgcaaaagggagctcatttctcataatatttgatggggctaattaggagttccagacagaaagctgaggatcttgttatcgaattttctatgtacgtatgagattatattgtcaaattttctatggaacaaaataagagtcctggtcctcctggtggtttcccattgagttctaccacatatgataagagtttgattaaatggtgtctaaaagctatgattgatgatttccatagaagtaacattaacattgctaccttgaactatggaattatcacattgaatcctaaaaccagtgatgctaaacaaattcaaaattgctggtcaattttcctcttggatgttagtttcaaaattttcactaaaatgtttatgaatagattgagtgggtggtgagtcctccaatttctcttagacaaactgcttttattaaaggtaggtacattgtggaagggtccatatcctacatgaagtcatgaacactataaatgctaaaatatcaaagtgctatgattttcaaagtggactttaaaaaagcatatgacaaatttaaatggtcttttgaacataagatatcgagtttaaaaagttttccagatatatcgaactggttgtgaaaagctatgtttgatgatttccatggaggtgacattaacattgctacgttgaactatggaattatcacattgattcctaaaattagtgatgctacacaaattcaaaattttaggcccatttctgtcttg

SEQ ID NO: 225 - DNA, 2538 bp, Triticum aestivum
  source 1..2538: mol_type = unassigned DNA
atggtgcgccgcggggcgctcccgctggcgctgctggccgtgctcgcgacgctgacggccgtggcggggcaggggaagccggtcacggacaacggctcgggcggcgggtcggggccgtccaagttcacgcccaaggacgccttctacatcgactgcggcggcacggccgccgccgacaccaaggacggcaagtccttcaagaccgacgcggaggccaacagcctgctctccgccagggacaacatcaaggtcgccgacgacaaggccgacgtgccgtcgcacctctaccgctccgcgcgggtcttcaaggaggaggccgtctacaacttcccgctcacggcccccggctggcacttcatccggctctacttcttccccatcaagagcggggaggccgacctcgcggcggccacgttcgacgtgtccaccgccgttaacgtccttctccacggcttcacccccgaggcgaaggcggtcatgaaggagtacatcgtcaacgccacggagaacaagctcgagctcaagttcaccccgcagtcgggctcggcgttcatcaacgccatcgaggtcgtcaacgcccccgacgagctcatcagcaagacggccctgacggtgtcgccgctagccgagacaagcgggttgtcagaggctgcgtaccaggtggtgtgccggctcaacgtcggtggcccgcccatcggccccgtgaacgacacgctcggccggcagtgggaggacgacgggcagtacctgaaccccaaggacgccgggacggaggtgtcggtgccgacgagcgcgatcaagtaccccgacgcgttcccggcgaccaagctcgtggcacccacggcggtgtacgcgaccgcccgccacatggctgaatccggcgtcgcgaaccagaacttcaacgtgtcgtggaaggtggacgtggacccgtcgttcgactatctcgtccgcctcttcttcgccgacatcataagcacgtccgccaacgacctctacttcaacgcgtacatcaacggccgcaaggccatctccgccctggacctctccaccatcaccggcgacctggccgcgccctactacaaggacttcgtggtgaactcgtcggtcaacaccgacggccacattatcatcggggtcgggccgctggggcaggacacgggccgcaacgacgcgctgctcaacggcgcggaggtgctcaagatgagcaactcggtgggcagcctggacggcgagttcggcgtggacggccggatggtggacgacggcagcggcacccgcaaagtggtcgctgccgtggggttcgccatgatgttcggcgccttcgccggcctgggatgcatggtggtgaagtggcaccggcggccgcaggactgggaccggcgcaacagcttctcgtcgtggctgctgcccatccacacgggccagtccttctccaacggcaaggggtccaagagcggctacaccttctcctccaccgcggggctgggccacttcttcaccttcgcggagatgtcagaggcgaccaagaacttcgacgagagcgccatcatcggcgtgggagggttcggcaacgtgtacgtgggcgagatcaacgaccccgacgaggaggggtccaggatcaaggtggccatcaagcgcgggaacccgtcgtcggagcagggcatcaacgagttcaacaccgagatccagatgctgtccaagctccggcaccgccacctcgtgtccctcatcggctactgcgacgagggcgaggagatgatcctcgtctacgagttcatgcagcacgggcccttccgcgaccacatctacggcggccccgagggcctgcccacgctctcctggaagcagcgcctcgagatctgcatcggcgccgccaggggcctccactacctccacaccggcaccgcgcacgggatcatccaccgggacgtcaagaccaccaacatcctcctcgacgaaaagttcgtggccaaggtggccgacttcggcctctccaaggacggccccgggatgaaccagctgcacgtcagcaccgccgtcaagggcagcttcgggtacctcgacccggagtacttccggtgccagcagctgaccgacaagtcggacgtctactccttcggggtggtgctgctggagacgctgtgcgcgcgggcgcccatcgacccgcagctgccgcgcgagcaggtcagcctcgccgagtggggcctgcagtggaagcgcaagggcctcatcgagaagatcatggaccccaacctcaacggcaaggtcaacccggagtcgctcgccaagttcgccgagaccgccgagaagtgcctctgcgagttcggcagcgaccgcctctccatgggcgacgtgctctggaacctcgagtacgcgctgcagctgcaggaggccaacccgcccgagggcgccaccgacgccgacgacgccgacgcctccatcgtctcctccgccagcggcgtcaccaccgtgcccgaccagtccaccacctccgccaacgagctcttcgcgcagctcgccgacatgaaggggagatga

SEQ ID NO: 226 - protein, 845 aa, Triticum aestivum
MVRRGALPLALLAVLATLTAVAGQGKPVTDNGSGGGSGPSKFTPKDAFYIDCGGTAAADTKDGKSFKTDAEANSLLSARDNIKVADDKADVPSHLYRSARVFKEEAVYNFPLTAPGWHFIRLYFFPIKSGEADLAAATFDVSTAVNVLLHGFTPEAKAVMKEYIVNATENKLELKFTPQSGSAFINAIEVVNAPDELISKTALTVSPLAETSGLSEAAYQVVCRLNVGGPPIGPVNDTLGRQWEDDGQYLNPKDAGTEVSVPTSAIKYPDAFPATKLVAPTAVYATARHMAESGVANQNFNVSWKVDVDPSFDYLVRLFFADIISTSANDLYFNAYINGRKAISALDLSTITGDLAAPYYKDFVVNSSVNTDGHIIIGVGPLGQDTGRNDALLNGAEVLKMSNSVGSLDGEFGVDGRMVDDGSGTRKVVAAVGFAMMFGAFAGLGCMVVKWHRRPQDWDRRNSFSSWLLPIHTGQSFSNGKGSKSGYTFSSTAGLGHFFTFAEMSEATKNFDESAIIGVGGFGNVYVGEINDPDEEGSRIKVAIKRGNPSSEQGINEFNTEIQMLSKLRHRHLVSLIGYCDEGEEMILVYEFMQHGPFRDHIYGGPEGLPTLSWKQRLEICIGAARGLHYLHTGTAHGIIHRDVKTTNILLDEKFVAKVADFGLSKDGPGMNQLHVSTAVKGSFGYLDPEYFRCQQLTDKSDVYSFGVVLLETLCARAPIDPQLPREQVSLAEWGLQWKRKGLIEKIMDPNLNGKVNPESLAKFAETAEKCLCEFGSDRLSMGDVLWNLEYALQLQEANPPEGATDADDADASIVSSASGVTTVPDQSTTSANELFAQLADMKGR

SEQ ID NO: 227 - DNA, 4135 bp, Triticum aestivum
  source 1..4135: mol_type = unassigned DNA
atagagacttataagtcccagaaaccaaacagatagggactttttagggacttgggacttataagttgggactaaaaaaagtcctaagacttatgaaccaaacagggccttagtatgaattgctggtttcacaatgggcgatgaaagataacctcaaacagttttgctaaagcacatctagatgtgccataagtattgcacatctaagttctatgtcattgattttgcatcgagatttgtgtgaatattttttttttgtgcttgattcactcacttagatgtgcaataactaaagcacatctagatgtgccctagacacacccaacctcaaaaccaggccgggtggctcctggaaagacctgcaacatcgatcgcatctccatctttctcttctcccattggcgtgcaactagcacaagctccaatcatggtcaccgtcgatcgttgagccagcagcaacaaccacaagctccaagaatagccatgtgcagaatgacttgcgtcaatggtggacgagcccccaaacatagcacgccgacgcccgggtcaaaccggcttaaacttggcatggcgccacccaccaccgcttaacccccgcccatttctccctccccctcaagtctcctccgcccccttccctctcctccgattggccccgcccaaccagagagagggcgagagggcgccaccccagccaggcccaggccaccacaataacaaaaatcagcacgacgacgtccccggcgtcgggcgctgcgcgtcgaggtggcggcggcggccgcggtgtcgacttgagcggcggcacaacagcagcgtgtgggcgagggtgacgaggacaagcaccgcgcttaagatggtgcgccgcggggcgctcccgctggcgctgctggccgtgctcgcgacgctgacggccgtggcggggcaggggaagccggtcacggacaacggctcgggcggcgggtcggggccgtccaagttcacgcccaaggacgccttctacatcgactgcggcggcacggccgccgccgacaccaaggacggcaagtccttcaagaccgacgcggaggccaacagcctgctctccgccagggacaacatcaaggtcgccgacgacaaggccgacgtgccgtcgcacctctaccgctccgcgcgggtcttcaaggaggaggccgtctacaacttcccgctcacggcccccggctggcacttcatccggctctacttcttccccatcaagagcggggaggccgacctcgcggcggccacgttcgacgtgtccaccgccgttaacgtccttctccacggcttcacccccgaggcgaaggcggtcatgaaggagtacatcgtcaacgccacggagaacaagctcgagctcaagttcaccccgcagtcgggctcggcgttcatcaacgccatcgaggtcgtcaacgcccccgacgagctcatcagcaagacggccctgacggtgtcgccgctagccgagacaagcgggttgtcagaggctgcgtaccaggtggtgtgccggctcaacgtcggtggcccgcccatcggccccgtgaacgacacgctcggccggcagtgggaggacgacgggcagtacctgaaccccaaggacgccgggacggaggtgtcggtgccgacgagcgcgatcaagtaccccgacgcgttcccggcgaccaagctcgtggcacccacggcggtgtacgcgaccgcccgccacatggctgaatccggcgtcgcgaaccagaacttcaacgtgtcgtggaaggtggacgtggacccgtcgttcgactatctcgtccgcctcttcttcgccgacatcataagcacgtccgccaacgacctctacttcaacgcgtacatcaacggccgcaaggccatctccgccctggacctctccaccatcaccggcgacctggccgcgccctactacaaggacttcgtggtgaactcgtcggtcaacaccgacggccacattatcatcggggtcgggccgctggggcaggacacgggccgcaacgacgcgctgctcaacggcgcggaggtgctcaagatgagcaactcggtgggcagcctggacggcgagttcggcgtggacggccggatggtggacgacggcagcggcacccgcaaagtggtcgctgccgtggggttcgccatgatgttcggcgccttcgccggcctgggatgcatggtggtgaagtggcaccggcggccgcaggactgggaccggcgcaacagcttctcgtcgtggctgctgcccatccacacgggccagtccttctccaacggcaaggggtccaagagcggctacaccttctcctccaccgcggggctgggccacttcttcaccttcgcggagatgtcagaggcgaccaagaacttcgacgagagcgccatcatcggcgtgggagggttcggcaacgtgtacgtgggcgagatcaacgaccccgacgaggaggggtccaggatcaaggtggccatcaagcgcgggaacccgtcgtcggagcagggcatcaacgagttcaacaccgagatccagatgctgtccaagctccggcaccgccacctcgtgtccctcatcggctactgcgacgagggcgaggagatgatcctcgtctacgagttcatgcagcacgggcccttccgcgaccacatctacggcggccccgagggcctgcccacgctctcctggaagcagcgcctcgagatctgcatcggcgccgccaggggcctccactacctccacaccggcaccgcgcacgggatcatccaccgggacgtcaagaccaccaacatcctcctcgacgaaaagttcgtggccaaggtggccgacttcggcctctccaaggacggccccgggatgaaccagctgcacgtcagcaccgccgtcaagggcagcttcgggtacctcgacccggagtacttccggtgccagcagctgaccgacaagtcggacgtctactccttcggggtggtgctgctggagacgctgtgcgcgcgggcgcccatcgacccgcagctgccgcgcgagcaggtcagcctcgccgagtggggcctgcagtggaagcgcaagggcctcatcgagaagatcatggaccccaacctcaacggcaaggtcaacccggagtcgctcgccaagttcgccgagaccgccgagaagtgcctctgcgagttcggcagcgaccgcctctccatgggcgacgtgctctggaacctcgagtacgcgctgcagctgcaggaggccaacccgcccgagggcgccaccgacgccgacgacgccgacgcctccatcgtctcctccgccagcggcgtcaccaccgtgcccgaccagtccaccacctccgccaacgagctcttcgcgcagctcgccgacatgaaggggagatgatccatcgtctgaatcgatcatccatccctccacgcgtcgccgtcagtcctcaccgatcgagcagcaccgccctagttcgtcaatccgtgcgcgcgccttctgcatgccagtccatgcatgcatccatggtggaacggatcaaggaaggatccgatcataactcaaaaccaaaccaggtcgatcgaagagtgtatatatgtgtgtaatgtatgtatgtgtctcaatcgcgtttaccgatgcagaaaattccaaaatgtataccgcaactgtatgtaaaatcatggcgtcaattacactttgtctcacaaaaagtgttgattttgttagcatgcattcagctggagctcatttctcttttcccccgcataacaaagagctcgtttctcttaatattgattggattattagtaggatttccagccagaaagctgaggatcttgttatcggatttttctatgtatgagatttatattgctgaattttctatggaacaaaataagagtcctggtcctgctggtctcccattgagttttaccacatatgatgcaatttgattaaatggtgtctaaaagctatgattgatgatttccagagaggtaacattagcattgctaccttgagctatggaattatcacattgattcctaaaagcagtgatggtaaacaaattcaaaattgctggcccatttccctcttgaatgttagtttaaatttttttcactaaaatctttatgaatagattga

SEQ ID NO: 228 - DNA, 2535 bp, Triticum aestivum
  source 1..2535: mol_type = unassigned DNA
atggtgcgccgcggggcgctcccgcttgcgctgctggccgtgctcgcgacgctgacggccgtggcggggcaggggaagccggtcacggacaacggctcgggcggcggggcggggccagccaagttcacgcccaaggacgccttctacatcgactgcggcggcacggccgccgccgacaccaaggacggcaagtccttcaagaccgacgcggaggccaacagcctgctctccgccagggacaacatcaaggtcgccgacgacaaggccgacgtgccgtcgcacctctaccgctccgcgcgggtcttcaaggaggaggccgtctacaacttcccgctcacggcccccggctggcacttcatccggctctacttcttccccatcaagagcggggaggccgacctcgcggcggccacgttcgacgtgagcaccgccgtcaacgtccttctccatggcttcacccccgaggcgaaggcggtcatgaaggagtacatcgtaaacgccacggagaacaagctcgagctcaagttcaccccgcagtcgggctcggcgttcatcaacgccatcgaggtcgtcaacgcccccgacgagctcatcagtaagacggccctgacggtgtcgccgctagccgagacaagcgggttgtcagaggctgcgtaccaggtggtgtgccggctcaacgtcggtggcccgcccatcggccccgtgaacgacacgctcggccggcagtgggaggacgacgagaagtacctgaaccccaaggaggccgggacggaggtgtcggtgccgacgagcgcgatcaagtaccccgacgcgttcccggcgaccaagctcgtggcacccacggcggtgtatgcgaccgcccgccacatggctgaatccggcgtcgcgaaccagaacttcaacgtgtcgtggaaggtggacgtggacccgtcgttcgactatctcgtccgcctcttattcgccgacattataagcacgtccgccaacgacctctacttcaacgtgtacatcaacggccgcaaggccatctccgccctggacctctccaccatcaccggcgacctggccgcgccctactacaaggacttcgtggtgaactcgtcggtcaataccgatggccacattatcatcgacgtcgggccgctagggcaggacacgggccgcaacgacgcgctgctcaacggcgcggaggtgctcaagatgagcaactcggtgggcagcctggacggcgagtacggcgtggacggccggatggtggatgacggcagcggcacccgcaaagtggtggcggccgtggggttcgccatgatgttcggcgccttcgccggcctgggatgcatggtggtgaagtggcaccggcggccgcaggactgggagcggcgcaacagcttctcgtcgtggctgctgcccatccacacgggccagtccttcagcaacggcaagtccaagagcggctacaccttctcctccaccgcggggctgggccacttcttcaccttcgcggagatgtcagaggcgaccaagaacttcgacgagagcgccatcatcggcgtgggagggttcggcaacgtgtacgtgggcgagatcaacgaccccgatgaggaggggtccaggatcaaggtggccatcaagcgcgggaacccgtcgtcggagcagggcatcaacgagttcaacaccgagatccagatgctgtccaagctccggcaccgccacctcgtgtccctcatcggctactgcgacgagggcgaggagatgatcctcgtctacgagttcatgcagcacgggcccttccgcgaccacatctacggcggccccgagggcctgcccacgctctcctggaagcagcgcctcgagatctgcatcggcgccgccaggggcctccactacctccacaccggcaccgcgcatgggatcatccaccgcgacgtcaagaccaccaacatcctcctcgacgacaagttcgtcgccaaggtggccgacttcggcctctccaaggacggccccggcatgaaccagctgcacgtcagcaccgccgtcaagggcagcttcgggtacctcgacccggagtacttccggtgccagcagctgaccgacaagtccgacgtctactccttcggggtggtgctgctggagacgctgtgcgcgcgggcgcccatcgacccgcagctgccgcgcgagcaggtcagcctcgccgagtggggcctgcagtggaagcgcaagggcctcatcgagaagatcatggaccccaacctcaacggcaaggtcaacccggagtcgctcgccaagttcgccgagaccgccgagaagtgcctctgcgagttcggcagcgaccgcctctccatgggcgacgtgctctggaacctcgagtacgcgctgcagctgcaggaggccaacccgcccgagggcgccaccgacgccgacgacgccgacgcctccatcgtctcatccgccagcggcgtcaccaccgtgcccgaccagtccaccacctccgccaacgagctcttcgcgcagctcgccgacatgaaggggagatga

SEQ ID NO: 229 - protein, 844 aa, Triticum aestivum
MVRRGALPLALLAVLATLTAVAGQGKPVTDNGSGGGAGPAKFTPKDAFYIDCGGTAAADTKDGKSFKTDAEANSLLSARDNIKVADDKADVPSHLYRSARVFKEEAVYNFPLTAPGWHFIRLYFFPIKSGEADLAAATFDVSTAVNVLLHGFTPEAKAVMKEYIVNATENKLELKFTPQSGSAFINAIEVVNAPDELISKTALTVSPLAETSGLSEAAYQVVCRLNVGGPPIGPVNDTLGRQWEDDEKYLNPKEAGTEVSVPTSAIKYPDAFPATKLVAPTAVYATARHMAESGVANQNFNVSWKVDVDPSFDYLVRLLFADIISTSANDLYFNVYINGRKAISALDLSTITGDLAAPYYKDFVVNSSVNTDGHIIIDVGPLGQDTGRNDALLNGAEVLKMSNSVGSLDGEYGVDGRMVDDGSGTRKVVAAVGFAMMFGAFAGLGCMVVKWHRRPQDWERRNSFSSWLLPIHTGQSFSNGKSKSGYTFSSTAGLGHFFTFAEMSEATKNFDESAIIGVGGFGNVYVGEINDPDEEGSRIKVAIKRGNPSSEQGINEFNTEIQMLSKLRHRHLVSLIGYCDEGEEMILVYEFMQHGPFRDHIYGGPEGLPTLSWKQRLEICIGAARGLHYLHTGTAHGIIHRDVKTTNILLDDKFVAKVADFGLSKDGPGMNQLHVSTAVKGSFGYLDPEYFRCQQLTDKSDVYSFGVVLLETLCARAPIDPQLPREQVSLAEWGLQWKRKGLIEKIMDPNLNGKVNPESLAKFAETAEKCLCEFGSDRLSMGDVLWNLEYALQLQEANPPEGATDADDADASIVSSASGVTTVPDQSTTSANELFAQLADMKGR

SEQ ID NO: 230 - DNA, 4475 bp, Triticum aestivum
  source 1..4475: mol_type = unassigned DNA
ttttgttaacctaggataatttcctatgtagacactaaactggactagctggggccttgcgtaagattaatttattcatatgaacattgcaatttgatcatcaactgactaccaagagattctcaagcgaacaagagttggtaagacagctatttctaacagtttttcttaatccccgcaggaaaaaaaaacagtttttcttaatgtcttgctaagttgattaagacttcgttatgtctcggccgatgctatattcatgagatcttacattgagatccatgcaaaaatttcttttcaattctgttttctttatacatgttatgtcactcgactgagacttgcagtggagtccttgccacaccttttttcttagtatgaatggctggtttcacaatgggtgatgaaagataacctcaaaactagcacaagctccaatcatggtcaccgtcgatcgttcagccagcagcaacaaagacaagctccaagaatagccatgtccagttggtctcgtgcagaatgacttgcgtcaatggtggacgagcccccaaacatagcacgccgacgcccgggtcaaaccggcttaaacttggcatggcgccacccaccaccgcttaacccccgcccatttctccctccccctcaagtctcctccgcccccttccctctcctccgattggccccgcccaaccagagagagggcgagagggcgccaccccagccaggcccaggccaccacaataacaaaaatcagcacgacgacgtccccggcgtcgggcgctgcgcgtcgaggtggcggcggcggccgcggtgtcgacttgagcggcggcacaacggcagcgtgggggtgagggtgacgaggagaagcaccgcgcccaagatggtgcgccgcggggcgctcccgcttgcgctgctggccgtgctcgcgacgctgacggccgtggcggggcaggggaagccggtcacggacaacggctcgggcggcggggcggggccagccaagttcacgcccaaggacgccttctacatcgactgcggcggcacggccgccgccgacaccaaggacggcaagtccttcaagaccgacgcggaggccaacagcctgctctccgccagggacaacatcaaggtcgccgacgacaaggccgacgtgccgtcgcacctctaccgctccgcgcgggtcttcaaggaggaggccgtctacaacttcccgctcacggcccccggctggcacttcatccggctctacttcttccccatcaagagcggggaggccgacctcgcggcggccacgttcgacgtgagcaccgccgtcaacgtccttctccatggcttcacccccgaggcgaaggcggtcatgaaggagtacatcgtaaacgccacggagaacaagctcgagctcaagttcaccccgcagtcgggctcggcgttcatcaacgccatcgaggtcgtcaacgcccccgacgagctcatcagtaagacggccctgacggtgtcgccgctagccgagacaagcgggttgtcagaggctgcgtaccaggtggtgtgccggctcaacgtcggtggcccgcccatcggccccgtgaacgacacgctcggccggcagtgggaggacgacgagaagtacctgaaccccaaggaggccgggacggaggtgtcggtgccgacgagcgcgatcaagtaccccgacgcgttcccggcgaccaagctcgtggcacccacggcggtgtatgcgaccgcccgccacatggctgaatccggcgtcgcgaaccagaacttcaacgtgtcgtggaaggtggacgtggacccgtcgttcgactatctcgtccgcctcttattcgccgacattataagcacgtccgccaacgacctctacttcaacgtgtacatcaacggccgcaaggccatctccgccctggacctctccaccatcaccggcgacctggccgcgccctactacaaggacttcgtggtgaactcgtcggtcaataccgatggccacattatcatcgacgtcgggccgctagggcaggacacgggccgcaacgacgcgctgctcaacggcgcggaggtgctcaagatgagcaactcggtgggcagcctggacggcgagtacggcgtggacggccggatggtggatgacggcagcggcacccgcaaagtggtggcggccgtggggttcgccatgatgttcggcgccttcgccggcctgggatgcatggtggtgaagtggcaccggcggccgcaggactgggagcggcgcaacagcttctcgtcgtggctgctgcccatccacacgggccagtccttcagcaacggcaagtccaagagcggctacaccttctcctccaccgcggggctgggccacttcttcaccttcgcggagatgtcagaggcgaccaagaacttcgacgagagcgccatcatcggcgtgggagggttcggcaacgtgtacgtgggcgagatcaacgaccccgatgaggaggggtccaggatcaaggtggccatcaagcgcgggaacccgtcgtcggagcagggcatcaacgagttcaacaccgagatccagatgctgtccaagctccggcaccgccacctcgtgtccctcatcggctactgcgacgagggcgaggagatgatcctcgtctacgagttcatgcagcacgggcccttccgcgaccacatctacggcggccccgagggcctgcccacgctctcctggaagcagcgcctcgagatctgcatcggcgccgccaggggcctccactacctccacaccggcaccgcgcatgggatcatccaccgcgacgtcaagaccaccaacatcctcctcgacgacaagttcgtcgccaaggtggccgacttcggcctctccaaggacggccccggcatgaaccagctgcacgtcagcaccgccgtcaagggcagcttcgggtacctcgacccggagtacttccggtgccagcagctgaccgacaagtccgacgtctactccttcggggtggtgctgctggagacgctgtgcgcgcgggcgcccatcgacccgcagctgccgcgcgagcaggtcagcctcgccgagtggggcctgcagtggaagcgcaagggcctcatcgagaagatcatggaccccaacctcaacggcaaggtcaacccggagtcgctcgccaagttcgccgagaccgccgagaagtgcctctgcgagttcggcagcgaccgcctctccatgggcgacgtgctctggaacctcgagtacgcgctgcagctgcaggaggccaacccgcccgagggcgccaccgacgccgacgacgccgacgcctccatcgtctcatccgccagcggcgtcaccaccgtgcccgaccagtccaccacctccgccaacgagctcttcgcgcagctcgccgacatgaaggggagatgatccatcgtctgaatcgatcatccatccctccatgcgtcgccgtcagtcctcaccgatcgagcagccatgagcagcaccgccgttgttcgtcaatccgtgcgcgcgccttctgcatgctagtccatgcatgcgtccatggtggaacggattaaggaaggatccgatcataactcaaaaccaaacgaggccgatcgaagagtgtatatgtgtgtaatgtatgtatgtgtctcaatcgcgtttactgatgcagaaaattccaaaatgtataccgcaactgtatgtaaaatcatggcgtcaattacactttgtctcacaaaaagtgttgattttgttagcatgcattcagctggagctcatttctctttttccccgcaaaagggggctcatttctcataatatcactggtagaaaaaaggcttttagtcccggctgtgcaaccgggactaaatatgcgcgactaaaaaccccccccttagtcgcgcctcttacgaaccgcgactaaaggctttagtcccggttctcgtggctaaccgggactaaaggcctcctccgcaggtttagggttttagcccccctaaacctggtttctttttaatttgtagtgttttatttcttttatattttattttctgttttattttaattttgatgaagtttcagtacacatattctacgctactatatacatgcatatgaaatttcaaacaagaagaattcaagaggaatatataatatatattcaatctcgggtgaccatatacaacttcgaacaagtttccatacacaattaggatggatgaccatatacaacttcgaacaagtttcaatctcgggtatgcatataaatttcttcgtcctcggtatagtgttctcctttaggattgatgacttccctcatgaaaaatcctgctaattcatcttgaattggtcggaagcgagcttctggactaagccttctccgcaagttatccgtcgccttccgcacgctatccgatgccttccgctcagaggtgtgtctccggatgttctcacaaacatagtatccacatagattggtccccgg

SEQ ID NO: 231 - DNA, 28656 bp, synthetic construct
  misc_feature 1..28656: note = Description of Artificial Sequence: Syntheticpolynucleotide
  source 1..28656: mol_type = other DNA
tggcaggatatataccgttgtaaataacttcgtataatgtatgctatacgaagttattgtttctatggaatggcgacggcaccaatgggggagggcgacggcagcgggagcgaggaggagggggaagaagaatgggggagggcgacggcagcgggagctaggaggagggggaagaagaatgggggagggcgacggcgacgggagcgaggagggggaaaagagacgaatgcgggagtggatgactaaagacgagcccgaacggcgccgtctaacggctgccgggacggcctggagtgccacgtacgcgaaaaacgggccccacctgtcataaactcacttaactcagcccgatccgccgatcagtggtttttgcaaaacaattacgcaagacgtggtgctttctgcagagaatctgtatcctagtgtttttcgcaaaccgagccctcaaagtggtggttttatgcaatttactccctgccacaagacaataatcctttctcccctctttctcaatgatttccaacccgcaccccaccaactcacacgggatactaccatctcactgacacagggcctcgatgggcagcaaaggagaattagtggagtccgtaattcttcctccacacaaatacgtactctacctgtagtgttaaaagctgtgggacatatacgtcagtctaactttgactgtcaggtaaggtgcttggaaggtgataaagggtagttttggggtccaacggcccgccactacgctcggcccactgcccagagagagaaacgtgttctcggggaggcggggagagagggagctagcatttccaccgccttcaccctccgatcgcgccagcgtgtcccccctcgccctagggaaggcaggctgggccgtcggatccgggtataagtagcgacgcgcacgcgggccgtgcctattcctgtacttgccgccccgaccacctcccccgtttggttccaccattccattccagcgcaggacggcgggacgcgcgaggcggaggcggaaggaagcggagcgcgctcgcgctagggttcgtccgctccctctccccctctctgttccggccgaatcgaccgaccctagctggctagcgctgacccgctgcgccgaatgcaggcggaagcccccgagatcgcgaggtggtggaggcggagatgacggcgccgcgcggtggcggggatgtgccatcgtcgacggcgtcggcagccgccgccgccgcttcgatgaccgagcccaacacgccgacgtcggcgcacgcgtcggggctcaaccggcgggggtcgaggggcgccgccatggcctccttctccatggaggtcttcgacaacgaggtggtgccgtcctcgctcagcagcatcgcccccatcctgcgcgtcgccgccgagatcgagcacgagcgcccccgcgtcgcctacctctgtaagttcgttgcacttcgaagccgtctccgcgcccgcgcgtgcctgttttgggagattttcgacgccttttcctggcacagctcggcgcatttggtgtctcggtcggacgaaacgggcaactcgtgatgatatgtttggcgattcacagccgttgtagtgtttatttgggaaggttttgtgctcacgaatctcggaaaatacatgccgcgtgcgtcggttgttgttgtttttgtttctgggctgctttgattgttacgagtttattaaggggcatgtctgagatttctccgcgtatgttggttttgctgcgttagctggatcttcggctttgatatgtttctccttactcgtgaagctgatcttagaagtagctagcttctctcctgtatgctgcaccatgaggtgttcgtattcctatatgatcgtatcgacgagatggcttgtgtttgagagcgcagattagatttagttgatgcaacttccagattccaacgttctccctcgattgtgttgcttttgcttgaatttggtatctatttaatacttgctggttatgtttgaatcattaatttaggctaggatagtgctgcgcgatcagtttgcttggaaagttggaataccatatatcaggtagctcgtgtaggttcttcggtgtctctatgtgagatttctccgcctatgtcgatctagctgtacatgctgcgctagattttggatttagtgtgttttctccttttttcagtagctaattttgtcgcaggttagcttctgtatgcttgcattattcgtaccaaaccaaatcactactgtttttcgaagtgcagagccgcagatttgattcattttatggcttttccgacagttctccctagctcgttttgattgaatatgggcgctctctgtgttgtttgaatcatgtcagatatgacagttttgctccaccagcttttctctgaagaagtgcatatcacgtagcatgaatgggtgcttctggttcgcccttttttcgggatctcacgttgatctgttactctgtgaactaggtcggttctatgccttcgagaaggcgcacaggctggatcaaaactctgttggtcgtggcgtccggcagttcaaaacgtccctgcttcagcgcttagagaaggtgtgagacatctttctgtctcttcccctccataatttctgcatgatctagctgacttggcgtacatgagggtttgttttgttagttgatacatgtcgacttgatcatgttccctcgctggttttgactgggtcactgtatctggccttcatagatatattatgcaagttgttgaattattattactaccatcttagctttttaactgcttgcaggatatatataggtaatatagagtatgagtttgtttggctaataagcctcatggagttaaaaataagctggaagctaatatggacgactctaccttaatttagttgtcaaaatgtagtagtggtgcaagttatgttgtccaaatgctcagataaaccaaagggaaataggcaacatatgcacatgcagtttaagccatgaaagtatttcctacttttcatttttgtgttgtaatatatatcttgcagatacacgatttttaacttcaagagtatggtcgctggactttagttcagtacacatttgtttcatgataagcttaccaactccatctccaaatacatgacgtagaaagcatgtagtcaaacttctctacgtttgaccattaatcaaatcaaattatttagtttttttggatagaaattataccattgattcagaacagtttcactatatatctttttacttatatatgttgttcattgaagactcaaaatgcaaaacattatctatcttagaacggtgggagtatatttgattattagtgataagttgataactgtcgataatcaatctggaaattttattgtgattatcctatttgatgaccatattgggagttgtgatcagccaagcaaacctgcaagctcacttaatcctacctaacagataaagaacactgttctagtaatagaatggtgtgcttcgttttattgtgattatcttaatttttaaccatattgggagttgtgatcagccaagcaaacctacaagctcacttgatcctgcctgatagataaagaacattgttccagtaatagaatgttgtgcttcgttctacttattttgtttcaaagtcacaactaaaccttcagttcagattcaacatttatttcgtgtttctgctggggagggggatgaggtaaaatgacttcagattacaccatcctcctcatgattcgtctcaattgatcagtttgcaatggcagattcttgtttgttagagatataatgaggtagccacattctcatctgagcttattttttcagatgatccagttcaaatttaccacttttttgtttcctacttgaaatggccagcgaatgtagtagaatggggaaaaggagcagggacttagggttcccttgttttcttaaatcggattttgcctaacctactcttgaatccaaagatcctgccttaaaatttcccatttcgatcccacgcaatccaacaggataatagcccgagtctcgcaaagcgattgaagaaaactgatgcccgcgaaattgagagtttctatcaagaatactatgagaactatgtccgcaccctcgacaaaggggaacaagccgacaggtaattcccaatccctaacctatactgcgatctcccctataagtccaatccctcgctatcacgaatccggtcccatgacattgtcgcctccaggactcaacttgggaaggcctaccaaacggctggagtcctcttcgaggtgctctgtgccgtcaacaagaatgagaaggttgagcaagttaaccccgaggtttgtgctcactccagccaactgtcgtcgttctttctcagtagaaatctaggttccctctaatgcatcaagtttttccaaatttcctctgcacagattatgcgctggcacactgaggtgcaagaaaagaaagacatctacgcgccgttcaatattctgcctctcgatgcggccagtgcatcccagtccatcatgcagctggaggaggtatacgacttacaacaatgcagcctatttcctcaaaacaggaacaattgcattatgtactggttcaattaaagaaactgacgtggtcatcgaatgcatcattaacagataaaagcagcagtcgcagctctgcggtacacacggggtttgacctggccttctgcatttgagccggaaaggcagaaggggggtgagctcgatttgctcgattggttgagagctatgtttggctttcaggtctgctacccactccaggcaaaccaatttcgattggtccattgtattactataagctaacactagcttatcttcttgtgtgcagcgggacagtgtcaggaatcaacgggagcatttgattcttctcctcgctaatgtgcacattagacttgagccaaagcctgaaccacttagcaaggcacactcttctatcaatatttactttgacagcttgactttatgaatatcaattgataagcataagatcaatgggttttgcatgcataaaaatgtggtggtagcttctgacagaacaggatatttgcctgagtttctaatattttaaaaaaataaagttatttttcattggattagtaaccaattatttaccttcaacgttatgttgtgattgttggtgtaacttgccataacatacacatgcagtttaatttctttcttgatactactattttttatttccatattcttgacattagaatttgctggactggtgccactacttgcaaaaatgccagctgacttattggctttccaccacgaattcgattgattgaactttctgtatgcattattctgaagcaagtgcgtagctaaataatgttaattacaccctccatttcccatgctttgcttctctcctttttgttcatcgttgcttgatgattgatctcatccgttctttcacccctgaaacagctagatgaccgagctgttgatgtagtgatgaacaagttgttcaacaactacaagaagtggtgcaaatttttgtcacggaaacatagtttgaggtatataattccttaatcagtttcctctttatgtacattattgtgctgataatcttgcaactgcagaaatcctccaggtgctcaattacaggaagttcagcaacgcagaattttgtacctaggtctttatcttcttatctggggcgaatcagcaaatatccggtttatgccagagtgtctttgctacatttttcacaatgtaatttgcacattcttattatcatatcaagtaccaaatctcattgcaaaaatatatctttgaatgattcttctcaatgtgttcagatggcatatgagttgcatgggttgcttgctggaaatgttagtattgtgactggtgaaaatatcaggccatcttatggtggggatgaggaggctttcttaaagaaagtggtcacacctatctatcgtgtcatcagaaaggtactttgataaattaccattacctgaaattccaagttagtttgttctaaatataattgtggtggtttttcaggaggcaggaaaaagccaacatggaaaaactgcacattcagcatggtgtaattatgatgatctaaatgagtacttctggtctgtttacagccctattttctggtcacatgctgacagccttttcacactttctctgatagatcctactctgtttcaggacacctgattgtttctcactgggatggccaatgcgagatgatggtgacttcttcaaatccgtgcacgattcaaggcctgtagcagtggtacagttcgatataagtctgtcagtatctcttccaaagactttgattaggaggagaatactgacaaataactatttgtaggctggaagctcctcaccaaagggttctagtaaaggcacaggcaagacaaattttgtagagacaagatcgttttggcacatctttcgtagttttgaccgaatgtggaccttctatttgttggctctacaggtactgtgccaaaattttcgattggcttttttctctgtactatggtttttgatggtttgacactctgtgaatcttataatttttaaaccgaacaggcaatgttgatttttgcttggagtgaatattcagtgactcaaatccttcagaaggacctcttatattctctatcaagcatatttgtcacagcagcatttttacagttcctccaaagtatgtttcccatttcaaatacttgttttatgtacaaggcatttttctgatgcatgtaatatttccttttattttttgagaacctgaaatttttagtatgacaagtgatgaatattggcataatttagttccctttatgtatgtaataccttctgcttttgtcaatggcattacggtaagactatgttaagctaggttcccgcgatacagagcactttcacagcagaaagcaactggcaagaacattcatgtagatatctgcaactttaggatctcttctcatatgcattaaactagtgttactataccgagcagtcatgttcttgagatgctctctggtctggaattcttgtggttttaagagggttctggtgcaataacaaattcgtcatccaactgaaactgatattttctttaattttgatggcaggtattttagactttattctgaactttcctggccacattagatgcaagttcattgacgtcgtgagaaatattctgaagatagtagttagtgccgcgtgggctgtgattcttcccattttctatatcagaagtcaaacaaaagtcaatttaccactgaaaaatctggacagatggtttggttatgtgaaaggagtgccacaactatatatcctggctgtggcggtgtacctgatacctaatatgattagtgcaacgctcttcctgtttccgatgtttcgaaggtggatagagagctcggattggcatattgttagactgctactgtggtggtctcaggtattgaattcaatctattttatttgtttatgttctattatgtggaaaattacttatgcagcttatcctcattgtaaatattcatttcaaaatttctgctatgaggcaatttttaataaggtaatatttgataaaatggaactgtattttgtagaatgaatttgtcttgatatccttgccagcttattgtttgtcatagtatcctagagggttgagaaactactgataaaattgtaaactgtaacttgcaaaaagagaaaataatccaatgacttctgatgccagggcagagattatcctgctattttgtcattagtttgaaaaaaacattttatggttagttaaaaagttctcacatgcttgtgaaaattgatagttttcacttctctaacaatatgtgttcaactgaacacatttgctatcccagtaatgaaaatgatattgcaagggtacatatgcacgaaacagggtggaaaacgtgaaggcaatagattattttgtatgcaatgcgtggaagtaaaataactggatgaatttccctggatcataaggcgctgtacatttattcgtttttcatatttctttcttgtgcggcttgctacactacactacactaatggcaatgcccattttccttgttcttgctgtacacgctaattgtataaataactgcagaaacgaatttatgttggccgtggaatgcatgaaagtcaagctgctcttctgaagtaagttactctgttctatttttcttctgttagagctttattctgcagaaaacactcaattctcttctattcaactgagaaggtacacattattttggattttgctgctatgcgcgaagctttccttcagttactttgtccaggtaagttctatgcttagttatttgcaaacatgctttgacgagattaatctgaaacagtttaatttgcagatacaacctcttataaggcctaccaaggatataatgagtgttcataacattcgttatgagtggcatgagttttttccaaacggtaattccaatgctttttttttttgtgccgccttcattctggaaccctttttttactgatacttcgttgccttttcagcatcatataatatcgctgctatcctatccctctgggcccctgttctgttggtatgcacttatccagcctgctagtgtagtgcctatccagcttatgtattagctgaaaagtagcttcatttattcccgtttgtttcaaaactgcattctaaatcttggtttatcaactacaatgcttttattcttgtaggtctatttgatggatacacagatatggtatgccattttctctacaatatccggcggtatgtctggggcacttggacgacttggggaggtaatgataaatctgaactattctctgtaatctgttgttttgctttataatttagaacttataatgaccataagtgtagggcaccccaagattgatggatagctaaggggctttttctttatattgaggagtaaactgaacgtgtcgaggtctcagtcaattgcatgaaacaaatagctcgtactttataaacataacggcgggctatgtagatggtaatacagttttatgcagaatattttgtttgaggaagcttagcgaggtattttaataagtgaaaatcaccttttttgtttttgcagcctgagaattcagaataaactacattagattataatggtaattttaagtagataaatatggaagtgtattcacaaggcaaatgggatattcatttttaggaggatcctctgggagtcgcacttcagtcttgtttctgttatgctgccgtatttacaagaaaacctttttcatattcatgaaatgaagcaaaaaatgtattgctggtggcttggtgtatttatagtcggatattctcctttttaaccgtcgacatttttgtattagcactgccttttttactttgttattgccgtacagcgttgtgtaactttttctttttgcaagagttaagaagctgaacttcatactgttctggtttctgatggagttactacactcttgtaccagattcgaacactaggaatgctgagatcacgatttcactctttgcctggagccttcaatacatatttggtgccatcagacaaaggcagaaacagacgtttttcactctcaaagcgcttcgcagaggtaccaaatgacaataacgaaaattattgtcaagatttctcttataaccccccttaaaagttatgatataatgaagaatttaaagtacaggtttcccccaacaagagaactgaagctgccaagtttgctcaactgtggaatgaagtgatttgcagtttccgcgacgaagattttataagtgataagtgaggcccttagatcatgttcacctagaaaacattatcattgcaatgtagataatggaccttctgttatgcagggagatggacctattggtggttccatactcatcagacccgagcctaaaattgatgcagtggccgttgttcttgcttgctagcaaggtttggcagaacaaatttaatatgtccactctaccttgttacatgtttgtgttcggctcttactggaaatcattttgattgaaatttgcagatacctatagctttagacatggcagcacaatttagaccgagagacagtgatttgtggaagcgtatatgtgctgacgagtatatgaagtgcgctgtaattgaatgctacgagtcattcaaacttgttcttaatttagtggtggttggagaaaatgaaaagaggtatcttcttatacttccattttccactgtttcacgtatctctatgtgagaaagacattgatgttgtttgtcatagcttttaggtattcagttaatgataacactaggaaatactccctccgtcccaaaattcttgtcttagatttgtctagatacggatgtatctaacactaaaatgtaactagatacatccgtatttagacaaatctaagacacgaattttgggatggagggagtatatacttacatccggaatagacattgtgcactatttttcttcaaaaaaatcgttactagtactccctccgttcggaattacttgtcgcggaaatggatgtatttagacgtattttagttctagatacatccatttccgagacaagtaattccgaacggagggagtacctagtaggtttctatgattgtctaaggctcctctgttgacgaatccttgccacttttgagcaagacagggccacccaggaaatcatttgtttcgttccaatatgataaaatcattcttaccataaactgggaaacacgcaggtcagcacaagtatttttgaacatataaagtggtcagacatggctgaatatttgtagtttgaacatgcacgttttcattcgtagtagttgatgcaaaagatcaatacaaatatattactaaaaatctacaaccctatatgataatggggtttgagagttcaagattacaaatacattacttttaccaataaatatatatctggctagttgcgtatggcggcacatcatcactttcaaacttaagaatcaagatattccaaattgaactagggaggaggactgccaagcacctccattgtgcaatatgcatggaagggaaaccatgattagttgtaactgctaaatgtgcaacatgtgttagataggcagccttagtactattgaaggcatctgtgtccatctttcatgttttttttactgcattgttctttatcattgcatgctcactgttatcttgatcttctactgacatgtttgttcactaacttcaacaggattattgggattataatcaaagagattgaagctaacatcgcaaagaatacattccttgccaattttaggatgagcgcattgccagtcctttgcaagaagtttgtggagcttgtatccaccttggtaagcaatgttgttacctctactgaacaccaaccctattgaagattgcattgcttgatatttttttagacaagtaacacgttcgattattgctacgattatgtgatcacatctgcagaaagaaagagacgcctcaaaatttgataatgtagtgctattgcttcaagacatgctggaagtgatcacgagggatatgatggtcaatgagatcaagtaataccttttgcacaaattataatcatacatgtgccttgtcatagaaactggtgactattttttttaacatgtgttgtttacagagaactagctgaatttggtcatgggaacaaggatttagttccaagaagacaactttttgcgggcacaggcacaaaacctgcaattgttttcccaccaccaatttctgcgcagtgggaagaacaagtaataacatcacattcttatttggcttttgtaacaaagaaggttcactaacttcacctatctacagattaagcgcttgtaccttcttttgactgttaaagaatcagcaatggatgtgcctacaaatcttgaagcccgccggagaatatcatttttcactaattcgctattcatggagatgccacgtgcgcctagagtgcgcaaaatgctctctttcaggtttgtctcgtatgtaaactttcaacatatcacagtgttgtccagtccacttttctaaatacaccgcagtatcgaaaatcataatgtctagctaaattagctggattcattggagcctggcagctactggctaatggtccttttactgtgcttcttaaaaagaattatatctgcttgtcaagatatattttgggctgaattatggtatgttcttaactctgatcagtttgaaagaacagaaaacatgaatatttttgggcgtggaattgtgaatttgtgctagtcaggaaagaggaaagcaccattaagaccaaggagaagcttatcaatgttgggattttaactgatttttttgctgtttgatgaactcgtattctgaactaaatggcggggtggtttctaattttcacggtcagttgtttaggatttttttattacaggttattttgatcactgccatcctcatcgtagtcttaaaaaacttcttgctgtcatttgatgtgttgtttaagctaaaaatggaagtatgagtgtcctgatgccattatgtggtattgagttgcttttgaaactgtctttgagtctgccactctcattgtctcagcagatttgcatgccccttctcggtattaactacagagtcggagttttgtgtcttgaccagttaacccaatggcgccatgatcatactagaaccgaagttcatctacagttttgatcagaattcatttaaagttgcattatattacaactgattctgtactcatcagctcatgttcgcttgatggtaaacaaaatttataaacagaagtgttgaacatccacaatgtctggcagtggcactctgtaatcttgttacttgtacaagtacatatgtttccaccttaaaggaaaaatgcacctagatattctaaaaaaataacaagtggtgaacttccaggtggagacctgtacaacagaatgtgtgcgacccatctttaagtgcattcataatcacaaatcaacaacgttaacaccagaaatatattatcagttcacaacaacaaatatctgataaaccgtatggttaaatttgttctgtgatcataagagtttcagcgaaaaagattgggctctagatgattcatatgacacttgttcttcacagtgtaatgacaccatactacagtgaggaaactgtatattcaagaaacgaccttgatctggagaatgaggatggtgtatcaattatattctacctgcagaagatctttccaggttcctttcctatttgatgtgtttaatgcctacagttctttatgaatttgattgccagctttttgtcttctattcttgataatttttgttatatagatgaatgggataatttcatggaaaggattgattgcaaaaaagaaactgaagtttggggaaatgaagaaaatgttcttcaacttcgtcattgggcctctcttagagggcagacactctgtcgaacaggtacttcggccataccctttaaccttgtcaaatatggatcatttagctgattccgtgtttacatgtttttcttattgtgaatagtgagaggcatgatgtattacaggaaagctttgaagcttcaagcattcctagacatggcttctgaatctggtgagcttcttcaacttccaattcgagcattcctagacatgatgcatttagcattcctagacatgttcacaaatataagatgttttggatatttcaatatggactacatgtggactgaaatgagtgaacaaacacagtaagcttctattaataaagttagaacatcttatatttgtgaacggagagggtaccttttacaaatacttcctgattttatattgtagaactaggggagcatccgcaataggtgcaaaaagggggagtttttttcatgagaagagaactaggtctacatattatagcatctttttagaagttagacccaatcttattggacacttggaaggggtctatgcactgaggatgttctagaaggctataggggacttatacaaagtgtccaacatcaccctcttttgtttgcagagatactagaaggctataaagccattgcagatcccgcagaggaagagaagaaaagccaaagatctctgtcttctcagcttgaagctatagcagacatgaaattcacatatgttgctacgtgccagatctatggaaatcagaaacagtcgggtgatcgacatgcaacagatatactgaacttgatggtgcagtaagtgatctcgatgatctattctagaaattaatatacaacatttggccaagtgcgatacatcatgtctaccacaatgagcaaaatgttttcttgtataactctttggagactgtgtgtctcggttatgtttatatttagttcacatttaattgataatgagatgttccttgagggaaaattactgaattgcttcttttattcaaattgttatttccctctgtgcaaagtaatttcagttagaatttgaaactacagttatcctggtctccgcgtggcatacattgatgaagttgaggagagggatggtgagaaggtgcaaaaggtcttctattcggtgctagtaaaagctcttgacaatcacgatcaggtaatcattttacgtgaagcgagttcaaactttcattttggttctgatttaaaccttcaatactcagtagtgcgttatgtacttttttgtcctgtgaaggaaatataccgcataaaattgccagggccagcgaaattaggtgaagggaaacctgaaaaccaaaatcacgcgatcatttttacccgcggagaagctttgcaaaccattgatatgaaccaggtgaacttcatggttatagtacctttttggtaagtaggttgcattctgtcttttgtacttatcaatgctgtttaggacaattatttggaggaagctttgaaaatgcggaatttgctggaagaattcaatgagaaccatggtattcgtcctccaacaattcttggagtacgtgaacacatattcaccggaaggtgtgttttaagctttgcagtaggttttacttagttttctttgtcaaaattgcaaatcaatgcctaacatctgacattgctggattgtagtgtgtcatctcttgcctggtttatgtcaaaccaggaaaccagctttgtgacaataggacagagggttcttgccaatccattgaagtaagtctgaatatactttgatatgtcctatttgaattaagcgcaatccatagttatcatatttatatgctgcaatatgagtagggagtgctgagcatctatggtgactatctcctggatgagcgcttatgtttttttttatcagctcttgaaatgcacacacatgtttgttggagattttagaggcagtaaggcaataaatattaaaacaaccaagtgctatttcctggaactttcctggcataaaatcttttgaagctaaacaatgtcatcaatttaaagtgtatattgtggtctaagtgctgtatatctgacatgctgtttcctgaaactttcctggcatcaaagcttttcaagctaaacaacgtcgccaatttaaagggtgtattattgtgtatgtgctgtatatctgacatgctgtttcctgtcagtaaagcttttcgagctaaaaaatgtcgtcaatttaaaatgtgtattatatctactccctccgttcctaaatataagtctttggagagattccactatgaatcacatacggatgtatgtagatgcattttagaatgtagattcatccattttgctccgtatgtagtccatagtggaatctctacaaagacttatatttaggaacggagggagtaagtgataaatatctgacatgctgtttcctgaaactttcctggctgagcttttcaagctaaacaatgttgttaatttaaagtgtgtggtatggtcattggtcattgctatgtatctgacattctcttttctgggcagggtacgttttcactatggacatcctgatgtgtttgataggatatttcacattacaagaggtggaattagcaaggcttcctgtggtataaacttgagtgaagacatttttgctggtatgtacttttccacctattctaactgttacctgtggatttttgagggaaatttaagaatggataggtccctaggacatccacatcctcgtatatgtgactcaaactgggtttgacaactgattcacacatgggccattatatgggcctcagacagactactctaaacttgattaagacactgatgctactcttatctaacacattaactcacattccaacatttcccatttctgctcttggacaacacaaacttaaattttctttttcaggtttcaactcaactctgaggcgaggaaatgtcacccatcacgagtacattcaagtcggaaaaggacgtgatgttgggttgaatcaaatttcactctttgaggccaaagtggcgtgtggcaatggagaacaagtgcttagcagagatatctaccgtttgggccaccgctttgacttcttccgaatgctctcatgttacttcacaactgtgggattttatgtcagctcaatggtacaaaacatctacctgcatcacatttgtcttgatttgccatcgtccatgttttttgatgttcttattactgtgcagatggttgtcataatagtatatgttttcttgtatgggaggctttatttagccttaagtggacttgagtttgcaattatgaagcaagcacgaatgagaggcaaccgtgctcttgaggcagccatggggtcccaatctattgtgcagctaggtctattgatggccttacccatgtttatggagatcggactggaaaggggttttagaagcgccctgggggatttcatcatcatgcagctacagctatgtgcagtattctttaccttttccctcgggacaaaatcacattattttggccgcacaatcctccacggtggtgcaaaatatagagcaactggcagaggctttgttgttcgccatgtaaagttcgctgaaaattacagaatgtatagcaggagtcactttgtgaaaggacttgagctcatgttactacttgtagtgtatgagctctatggtgatgtggcgacagattccacggcctatgttcttctgacatcatctatgtggttcttggtaatcacatggctgtttgctccattcctcttcaacccatcaggatttgaatggcaaaaggtggtggatgattgggatgattggaacaaatggataagcagccgtggcgggattggtgtgccggccaataaggcctgggagtcgtggtgggaagaggagcaggaacatctgctgtcaacaggcataatcggccgcatatgggaaatcatattatctctccgattcttcatgtttcagtacggtatcatgtaccatctgaatatctctaatggcaacaaaagcatatcagtaagtcatcctttatttttgctagtattttacaactctactcgaactaaatggatttcatgagactgattacatgatctttttgattgtttataatcactgtttactgatacaatttagtgactgtcccttcccaacttgattttgtggcttcagatttatggtctgtcttggctggtcactgtagcagtagtgttggtcctcaaggtaaatttcatttgcttgctgttgatgaaatcaataagtatatattggttggcgtatgcctctagtttatgtccttgttatgctgctgatatgctgccatttccttaggtggtatctatgggaagaaagaaatttagtgctgacttccagcttatgttccggctcctcaaattgttcttgttcattggatctgttggaactttggcgattcttttcacccttctgcaccttacagttggtgacatattcgccagcttccttgcctttgcacccacaggatgggccattctgcaggtacgtcatcactcatcagcaccaaagctttccttttgttttgttttaaggttttactcccagcttatcacgtgcgaggactgaggagtgaggagcagtatcaattcatagggagagagaaacgagagaattttgatcgagttaaagttgctattatcgaaattgacatctttcactggctctaatccgttcggcatcattgcaacagatatcacaggcaagcaagccagtggtgaaggcttttggtctgtggggatctgtgaaggccttgtccagggggtacgagtaccttatggggatcgtgatcttcgtgccagtggcggttctggcatggttcccttttgtctcggagttccagacgaggctgctattcaaccaggcattctcccgaggcctccaaatctctcgcattttggctggcggaaagaagcaaaactgaggcgagtctaggagatgggagatgttccatcacagtaatcacacagggtagacggaggcagaaattagctcgaggttcgttgttggaggggggcatcatatggctgctaacatactgacactttcagaagtttcttagtcttgtacacacagggcagttttccttaggcattttccatgtatatctcatgctaatacactcttacctctgatactagattgtacgttgcttgtatagatagatacatgcccccacaacagttgcgacaaaacattacggtgcttttagaggcaaagatgaaactgattttttgtgcatgaagcaacaaaacagttcggtctttctagattgagagatcaaatcgatttttgtgcatgaagatgtttgtgttgtgctgtacggtgtaccagtcagttccctgctttgtgcttgtgttgtctgaaactctgaatttaggctgatgtttgaacgcgctggcatttcccagctggaacctctgctttctataaaaaacaggcctgtatggcctttctaaaaatagtctgaattgatattacgtgagatctgtttttctagaatacaagagtaccttgcactggttcggactgttgcagcatatgagcataacataagttggacggctttttgcgttatgtttcatgcgtagacaaggataatgggacagaggttgtgaattatgacggtaggtacaactttacattaggtgaaggctgacatgagttaagatggaggacctgagtctgttatccttccagctttaagcaggccacctcacgtaatctgaattcacaaatgagctgaagcaacatcgattgcaatcataggagaccgatacagctttcagcttgtccctgcccgatgtctaatgattctccaagcgcagactgccaattaagtacacacgaggtgactgaaatcccacaacgacggtcatgatatcacaggaaaatttatatttttctgctttttaaaagttttttttctgcttttttgtttcccagctattgctgcattttggttcgagccatcatttctacggtcgggctgcttttgtagggtcagcgtgttttccgcgacaaattctcattgtgcctatcccgtcccccttcgcccactaggcaagaactctcagtgtcgtgactaggttttgacgtgcagagagtacacgacgcgtgatcgtgaggccaacacccaacagtatcctaggccctaacgcatggaaaccaagtgaccgagcgagaagagaatggaggcccagaatctttggtggaaagaaacgacgtggttgtcatgtacttatgctgattacaaaattgcaaagtctggtcagaaccatcatttggtcggcattgagagttttccttctttttgaatggacaggaattgagagttgatggtgcatggtgccatttaagcgatgttcaaacgggagctgtaaatcatcccgcattcggaaattattaaaccaatggcagttcatgggcaggcaaagccctgcacgaatcttggcggctcgcatcctctattgcagctttgagtggccgtagatttgcaaaagcaatggctaacagacacatattctgccaaaccccaagaaggataatcacttttcttagataaaaaagaacagaccaatatacaaacatccacacttctgcaaacaatacatcagaactaggattacgccgattacgtggctttagcagactgtccaaaaatctgttttgcaaagctccaattgctccttgcttatccagcttcttttgtgttggcaaactgcgcttttccaaccgattttgttcttctcgcgctttcttcttaggctaaacaaacctcaccgtgcacgcagccatggtcctgaaccttcacctcgtccctataaaagcctagccaaccttcacaatcttatcatcacccacaacaccgagcaccacaaactagagatccgaattcctgcagcccatcccaccatgcggaagttctccgaaatagctactcagcggtgtggtaatcgatcaatggcgctatcagctcctcccagtcaggaacagccgtcggggaagcaattcggctaccagctcgctgctgctgtgaggagcatcaactggacttatggcatattttggtccatttccgccagcccgcgcccaggccactcctcagttctggcgtggaaggatgggttctacaacggcgagataaagactagaaagattaccggctcgaccactacggagcttacagcggacgagcgcgtcatgcacagaagcaagcaactgagggagctctacgaatcgctcttgcccggcaactccaacaaccgggcaaggcgaccaaccgcctcactgtcaccggaggatctcggggacggcgagtggtattacaccataagcatgacttacaccttccaccctaatcaagggttgccaggcaaaagctttgcgagcaatcaacatgtttggctgtacaacgctcaatacgcaaacaccagagttttcccccgcgcgctcttagcaaagacaatcgtttgcattcccttcatgggcggtgtgcttgagctcggaacgtcggatcaggtgttggaggacccgagcatggtgaagcggatcagcacgtctttctgggagctgcacttgccgtcatccttggagtcgaaggatccgagctccagcacatcagcaaacgataccagggaggccaccgacatcatcttgttcgaggatttcgaccacaacgacacagttgagggggtgatctctgagcaaagggaggtccagtgcccgtccaacgtcaatctggagcgcctcacaaagcagatggacgagttccacagccttctcggtggactggacgtgcatcctctcgaagacagatggatcatggacgagccctttgagtttacgttttccccagaagtggcgccggctatggatatgccgagcaccgacgatgtcatcgtcactttaagtaggtccgaaggctctcgtccatcctgcttcacagcgtggaagggatcatccgagtcgaaatacgtggctggccaggtcgttggggagtcacagaagttgctgaataaagttgtggctggtggtgcatgggcgagcaattatggcggtcgcaccatggtgagagctcagggaattaacagcaacacccatgtcatgacagagagaagacgccgggagaaactcaacgagatgttcctggttctcaagtcactggtcccgtccattcacaaggtagacaaagcatccatcctcacagaaacgataggttatcttagagaactgaagcaaagggtagatcagctagaatccagccggtcaccgtctcacccaaaagaaacaacaggaccgagcagaagccatgtcgtcggcgctaggaagaagatagtctcggccggatccaagaggaaggcgccagggctggagagcccgagcaatgtcgtgaacgtgacgatgctggacaaggtggtgctgttggaggtgcagtgcccgtggaaggagctgctgatgacacaagtgtttgacgccatcaagagcctctgtctggacgttgtctccgtgcaggcatccacatcaggtggccgtcttgacctcaagatacgagctaatcagcagcttgcggtcggttctgctatggtggcacctggggcaatcaccgaaacacttcagaaagctatataggcaagatgttttttgacattagtgtagtgctaaaaccgtcttatatttgggacgaagggagtacttagcgacgcaatctacaaaaaatcatgagttgggctctatagtcttcttcacccaggaatcaggtcggactagtgtgaattactgtacaccaaaaaaaaattccgaaataattactgaacacgtcatgacctcgccccaaaaaatatccagatctatattccgcctatcaattaagcacgaagtttgaagggagtgcctagaactcatttagatgagatataatttggtctcattcaccttgaaaacgaaaacaaaaacaacccacgtcagcacacacgcatcttatagcatcacatccaatggctataaaaggtgaatgacagcaaattatacctcatctagatgagttctagcaaaactgtaatttgaagccgactatgctgcccgaccctactcactactacagaaatgcctagctagcggtggcggcactaagagcccattcggattctttccagcttcctgcgatgccagccacagccagcttctgatgggatgggagtagcgtttcgttcgacagcagagggtagctctgaagttcctattctctagaaagtataggaacttcggtcgagtcattcatatgcttgagaagagagtcgggatagtccaaaataaaacaaaggtaagattacctggtcaaaagtgaaaacatcagttaaaaggtggtataaagtaaaatatcggtaataaaaggtggcccaaagtgaaatttactcttttctactattataaaaattgaggatgtttttgtcggtactttgatacgtcatttttgtatgaattggtttttaagtttattcgcttttggaaatgcatatctgtatttgagtcgggttttaagttcgtttgcttttgtaaatacagagggatttgtataagaaatatctttaaaaaaacccatatgctaatttgacataatttttgagaaaaatatatattcaggcgaattctcacaatgaacaataataagattaaaatagctttcccccgttgcagcgcatgggtattttttctagtaaaaataaaagataaacttagactccaaacatttacaaaaacaacccctaaagttcctaaagcccaaagtgctatccacgatccatagcaagcccagcccaacccaacccaacccaacccaccccagtccagccaactggacaatagtctccacacccccccactatcaccgtgagttgtccgcacgcaccgcacgtctcgctgcccaaaaaaaaaaaaggaaggaaaaaaaggaaaaggaaaaacagcaggtgggtccgggtcgtgggggccggaaacgcgaggaggatcgcgagccagcgacgaggccggccctccctccgcttccaaagaaacgccccccatcgccactatatacatacccccccctctcctcccatccccccaaccctaccaccaccaccaccaccacctccacctcctcccccctcgctgccggacgacgagctcctcccccctccccctccgccgccgccgcgccggtaaccaccccgcccctctcctctttctttctccgttttttttttccgtctcggtctcgatctttggccttggtagtttgggtgggcgagaggcggcttcgtgcgcgcccagatcggtgcgcgggaggggcgggatctcgcggctggggctctcgccggcgtggatccggcccggatctcgcggggaatggggctctcggatgtagatctgcgatccgccgttgttgggggagatgatggggggtttaaaatttccgccatgctaaacaagatcaggaagaggggaaaagggcactatggtttatatttttatatatttctgctgcttcgtcaggcttagatgtgctagatctttctttcttctttttgtgggtagaatttgaatccctcagcattgttcatcggtagtttttcttttcatgatttgtgacaaatgcagcctcgtgcggagcttttttgtaggtagacgataagcttgatgatccgtcgatcgtttcgcatgattgaacaagatggattgcacgcaggttctccggccgcttgggtggagaggctattcggctatgactgggcacaacagacaatcggctgctctgatgccgccgtgttccggctgtcagcgcaggggcgcccggttctttttgtcaagaccgacctgtccggtgccctgaatgaactgcaggacgaggcagcgcggctatcgtggctggccacgacgggcgttccttgcgcagctgtgctcgacgttgtcactgaagcgggaagggactggctgctattgggcgaagtgccggggcaggatctcctgtcatctcaccttgctcctgccgagaaagtatccatcatggctgatgcaatgcggcggctgcatacgcttgatccggctacctgcccattcgaccaccaagcgaaacatcgcatcgagcgagcacgtactcggatggaagccggtcttgtcgatcaggatgatctggacgaagagcatcaggggctcgcgccagccgaactgttcgccaggctcaaggcgcgcatgcccgacggcgaggatctcgtcgtgacccatggcgatgcctgcttgccgaatatcatggtggaaaatggccgcttttctggattcatcgactgtggccggctgggtgtggcggaccgctatcaggacatagcgttggctacccgtgatattgctgaagagcttggcggcgaatgggctgaccgcttcctcgtgctttacggtatcgccgctcccgattcgcagcgcatcgccttctatcgccttcttgacgagttcttctgagcgggactctggggttcgaaatgaccgaccaagcgacgcccaacctgccatcacgagatttcgattccaccgccgccttctatgaaaggttgggcttcggaatcgttttccgggacgccggctggatgatcctccagcgcggggatctcatgctggagttcttcgcccacccccggatccccgatcgttcaaacatttggcaataaagtttcttaagattgaatcctgttgccggtcttgcgatgattatcatataatttctgttgaattacgttaagcatgtaataattaacatgtaatgcatgacgttatttatgagatgggtttttatgattagagtcccgcaattatacatttaatacgcgatagaaaacaaaatatagcgcgcaaactaggataaattatcgcgcgcggtgtcatctatgttactagatcataacttcgtataatgtatgctatacgaagttataaggccagtcagcccatgggctgctcccagtactcgggccccgctgtggcagcacgccatgtaatagttttcgcgggaatccaacgccgaaatcgcccgcagcgggaacccgacgtcggtctggtgcgttctggcgccttccagaactctccacaggctcccgcagccgtccgatcagatcagcacgaagcacgaacattggcgcgcggcgatattttctttcctcgcccgacgacggccgcactgcatttcattttgaatttcaaaattcggaaacggaaaagctttctcgcatcccgaggcgaggcggttacgggcgccagaggggccaccccacccacccacccccgccctcacgtgccccgcgcggccgcatccgggccgtccgcgcggacagctggccgcgcccagcccgaaccgacgcccaggatcgagcgagggcggcgcgcccggggcttggcttagcgtccacgccacctccggctatataagccgccccacacccgctccccctccggcattccattccgccaccgcaccaccaccaccaccaaaccctagcgagcgagcgagggagagagagaccgccccgccgcgacgatggagagatcccgcgggctgctgctggtggctggactgctggcggcgctgctgccggcggcggcggcgcagccgggggcgccgtgcgagcccgcgctgctggcgacgcaggtggcgctcttctgcgcgcccgacatgccgacggcccagtgctgcgagcccgtcgtcgccgccgtcgacctcggcggcggggtgccctgcctctgccgcgtcgccgccgagccgcagctcgtcatggcgggcctcaacgccacccacctcctcacgctctacagctcctgcggcggcctccgccccggcggcgcccacctcgccgccgcctgcgaaggtacgttgtccgcctcctcccctccctccctccctccctctctctctacgtgctcgctttcctgcttacctagtagtacgtagtttcccatgccttcttgactcgctagaagtgctccggtttgggtctgttaatttcctcgctgtactaccggatctgtcgtcggcacggcgcgcggcgtcgggtcctcgccttctcccgtggcgaccgacctgcgcagcgcgcgcgcggcctagctagcttcataccgctgtacctcgacatacacggagcgatctatggtctactctgagtatttcctcatcgtagaacgcatgcgccgctcgcgattgtttcgtcgattctagatccgtgcttgttcccgcgagttagtatgcatctgcgtgcatatgccgtacgcacgcagatgcagagtctgttgctcgagttatctactgtcgttcgctcgaccatatttgcctgttaatttcctgttcatcgtgcatgcagtagtagtagccatgtccacgccttcttgttttgaggcgatcatcgtcgagatccatggctttgctttctgcactatcttctgccttgttttgttctccgcagtacgtacgtcttgcttggtcaaaactgaaaaacgctttgctgtttgtttgatcggcaagagctggccgtgcttttggcaccgcagtgcgtcgcctctgccgcttttgcgaaacatttccatgttgatcctctggcggaactactttttcgcgtgcggtttgcgtggccttcctctctcgtgaaaagaggtcgggtcaaaccaaatggatcgcctcttggcagagcagcggcagcagatagctggccgtctcgcagctttggcagaaccggtctgtggccatctgtcgccgcctgccaccgtttccctgatgtttgtttctctctcgcctgccactgtttcttttcttgttgcgcacgtacgtcgtcacctcctcctacttttttgccagttttgtttacttttgatgaaatatacggatgaatcggctggtgattaactttggctgctgctgttaattactgtggattttggatgcaggacccgctcccccggccgccgtcgtcagcagccccccgcccccgcctccaccgtccgccgcacctcgccgcaagcagccagcgcgtaagaacctctccctctccctctctctctccctctcgcctgcatctcgctatgtttatccatgtccatatgttgatcagccttgtttagttactaacatgtgcaccggatcgggttctcgcagacgacgcaccaccgccgccaccgccgtcgagcgagaagccgtcgtccccgccgccgtcccaggaccacgacggcgccgccccccgcgccaaggccgcgcccgcccaggcggccacctccacgctcgcgcccgccgccgccgccaccgccccgccgccccaggcgccgcactccgccgcgcccacggcgccgtccaaggcggccttcttcttcgtcgccacggccatgctcggcctctacatcatcctctgagtcgcgcgccgaccccgcgagagaccgtggtccgtccagtcgcagtagagtagagcgctcgtcgtctcgttccgtttcgtgcctgtcgccgttcgaggttcgtttctgcgtgcagtccggtcgaagaagccggtgggttttgagtactagtggtagtagtagcagcagctatcgtttctgtccgctcgtacgtgtttgcgtggtcgcggagaacaattaattgggtgtttgcgagtcctctggttaagatgaaccactgatgctatgtgatcgatcgatcggtatgatctgaatggaaatggatcaagttttgcgttctgctgatgatgtgatccatttggatctgtgtggggcaacagtttcgcttgcttttgctctgcgatgaacgaatgcttcttgcatgcatcttgtctttgcttaatttgaactgtagaacggatgcagtactgatttctgcttatgatgtgacgattcgtcgtacgcatatcatctcttcaaatttgtgtagcagctgtttgtagcttccattctgctatggacgaatgcctgtttttcacggagaaccgcgcgcggggaccgatgcggctttgtgttgccatggaagttcctattctctagaaagtataggaacttcggcaggatatattcaattgtaaa

SEQ ID NO: 232 - DNA, 30107 bp, synthetic construct
  misc_feature 1..30107: note = Description of Artificial Sequence: Syntheticpolynucleotide
  source 1..30107: mol_type = other DNA
tggcaggatatataccgttgtaaataacttcgtataatgtatgctatacgaagttattgtttctatggaatggcgacggcaccaatgggggagggcgacggcagcgggagcgaggaggagggggaagaagaatgggggagggcgacggcagcgggagctaggaggagggggaagaagaatgggggagggcgacggcgacgggagcgaggagggggaaaagagacgaatgcgggagtggatgactaaagacgagcccgaacggcgccgtctaacggctgccgggacggcctggagtgccacgtacgcgaaaaacgggccccacctgtcataaactcacttaactcagcccgatccgccgatcagtggtttttgcaaaacaattacgcaagacgtggtgctttctgcagagaatctgtatcctagtgtttttcgcaaaccgagccctcaaagtggtggttttatgcaatttactccctgccacaagacaataatcctttctcccctctttctcaatgatttccaacccgcaccccaccaactcacacgggatactaccatctcactgacacagggcctcgatgggcagcaaaggagaattagtggagtccgtaattcttcctccacacaaatacgtactctacctgtagtgttaaaagctgtgggacatatacgtcagtctaactttgactgtcaggtaaggtgcttggaaggtgataaagggtagttttggggtccaacggcccgccactacgctcggcccactgcccagagagagaaacgtgttctcggggaggcggggagagagggagctagcatttccaccgccttcaccctccgatcgcgccagcgtgtcccccctcgccctagggaaggcaggctgggccgtcggatccgggtataagtagcgacgcgcacgcgggccgtgcctattcctgtacttgccgccccgaccacctcccccgtttggttccaccattccattccagcgcaggacggcgggacgcgcgaggcggaggcggaaggaagcggagcgcgctcgcgctagggttcgtccgctccctctccccctctctgttccggccgaatcgaccgaccctagctggctagcgctgacccgctgcgccgaatgcaggcggaagcccccgagatcgcgaggtggtggaggcggagatgacggcgccgcgcggtggcggggatgtgccatcgtcgacggcgtcggcagccgccgccgccgcttcgatgaccgagcccaacacgccgacgtcggcgcacgcgtcggggctcaaccggcgggggtcgaggggcgccgccatggcctccttctccatggaggtcttcgacaacgaggtggtgccgtcctcgctcagcagcatcgcccccatcctgcgcgtcgccgccgagatcgagcacgagcgcccccgcgtcgcctacctctgtaagttcgttgcacttcgaagccgtctccgcgcccgcgcgtgcctgttttgggagattttcgacgccttttcctggcacagctcggcgcatttggtgtctcggtcggacgaaacgggcaactcgtgatgatatgtttggcgattcacagccgttgtagtgtttatttgggaaggttttgtgctcacgaatctcggaaaatacatgccgcgtgcgtcggttgttgttgtttttgtttctgggctgctttgattgttacgagtttattaaggggcatgtctgagatttctccgcgtatgttggttttgctgcgttagctggatcttcggctttgatatgtttctccttactcgtgaagctgatcttagaagtagctagcttctctcctgtatgctgcaccatgaggtgttcgtattcctatatgatcgtatcgacgagatggcttgtgtttgagagcgcagattagatttagttgatgcaacttccagattccaacgttctccctcgattgtgttgcttttgcttgaatttggtatctatttaatacttgctggttatgtttgaatcattaatttaggctaggatagtgctgcgcgatcagtttgcttggaaagttggaataccatatatcaggtagctcgtgtaggttcttcggtgtctctatgtgagatttctccgcctatgtcgatctagctgtacatgctgcgctagattttggatttagtgtgttttctccttttttcagtagctaattttgtcgcaggttagcttctgtatgcttgcattattcgtaccaaaccaaatcactactgtttttcgaagtgcagagccgcagatttgattcattttatggcttttccgacagttctccctagctcgttttgattgaatatgggcgctctctgtgttgtttgaatcatgtcagatatgacagttttgctccaccagcttttctctgaagaagtgcatatcacgtagcatgaatgggtgcttctggttcgcccttttttcgggatctcacgttgatctgttactctgtgaactaggtcggttctatgccttcgagaaggcgcacaggctggatcaaaactctgttggtcgtggcgtccggcagttcaaaacgtccctgcttcagcgcttagagaaggtgtgagacatctttctgtctcttcccctccataatttctgcatgatctagctgacttggcgtacatgagggtttgttttgttagttgatacatgtcgacttgatcatgttccctcgctggttttgactgggtcactgtatctggccttcatagatatattatgcaagttgttgaattattattactaccatcttagctttttaactgcttgcaggatatatataggtaatatagagtatgagtttgtttggctaataagcctcatggagttaaaaataagctggaagctaatatggacgactctaccttaatttagttgtcaaaatgtagtagtggtgcaagttatgttgtccaaatgctcagataaaccaaagggaaataggcaacatatgcacatgcagtttaagccatgaaagtatttcctacttttcatttttgtgttgtaatatatatcttgcagatacacgatttttaacttcaagagtatggtcgctggactttagttcagtacacatttgtttcatgataagcttaccaactccatctccaaatacatgacgtagaaagcatgtagtcaaacttctctacgtttgaccattaatcaaatcaaattatttagtttttttggatagaaattataccattgattcagaacagtttcactatatatctttttacttatatatgttgttcattgaagactcaaaatgcaaaacattatctatcttagaacggtgggagtatatttgattattagtgataagttgataactgtcgataatcaatctggaaattttattgtgattatcctatttgatgaccatattgggagttgtgatcagccaagcaaacctgcaagctcacttaatcctacctaacagataaagaacactgttctagtaatagaatggtgtgcttcgttttattgtgattatcttaatttttaaccatattgggagttgtgatcagccaagcaaacctacaagctcacttgatcctgcctgatagataaagaacattgttccagtaatagaatgttgtgcttcgttctacttattttgtttcaaagtcacaactaaaccttcagttcagattcaacatttatttcgtgtttctgctggggagggggatgaggtaaaatgacttcagattacaccatcctcctcatgattcgtctcaattgatcagtttgcaatggcagattcttgtttgttagagatataatgaggtagccacattctcatctgagcttattttttcagatgatccagttcaaatttaccacttttttgtttcctacttgaaatggccagcgaatgtagtagaatggggaaaaggagcagggacttagggttcccttgttttcttaaatcggattttgcctaacctactcttgaatccaaagatcctgccttaaaatttcccatttcgatcccacgcaatccaacaggataatagcccgagtctcgcaaagcgattgaagaaaactgatgcccgcgaaattgagagtttctatcaagaatactatgagaactatgtccgcaccctcgacaaaggggaacaagccgacaggtaattcccaatccctaacctatactgcgatctcccctataagtccaatccctcgctatcacgaatccggtcccatgacattgtcgcctccaggactcaacttgggaaggcctaccaaacggctggagtcctcttcgaggtgctctgtgccgtcaacaagaatgagaaggttgagcaagttaaccccgaggtttgtgctcactccagccaactgtcgtcgttctttctcagtagaaatctaggttccctctaatgcatcaagtttttccaaatttcctctgcacagattatgcgctggcacactgaggtgcaagaaaagaaagacatctacgcgccgttcaatattctgcctctcgatgcggccagtgcatcccagtccatcatgcagctggaggaggtatacgacttacaacaatgcagcctatttcctcaaaacaggaacaattgcattatgtactggttcaattaaagaaactgacgtggtcatcgaatgcatcattaacagataaaagcagcagtcgcagctctgcggtacacacggggtttgacctggccttctgcatttgagccggaaaggcagaaggggggtgagctcgatttgctcgattggttgagagctatgtttggctttcaggtctgctacccactccaggcaaaccaatttcgattggtccattgtattactataagctaacactagcttatcttcttgtgtgcagcgggacagtgtcaggaatcaacgggagcatttgattcttctcctcgctaatgtgcacattagacttgagccaaagcctgaaccacttagcaaggcacactcttctatcaatatttactttgacagcttgactttatgaatatcaattgataagcataagatcaatgggttttgcatgcataaaaatgtggtggtagcttctgacagaacaggatatttgcctgagtttctaatattttaaaaaaataaagttatttttcattggattagtaaccaattatttaccttcaacgttatgttgtgattgttggtgtaacttgccataacatacacatgcagtttaatttctttcttgatactactattttttatttccatattcttgacattagaatttgctggactggtgccactacttgcaaaaatgccagctgacttattggctttccaccacgaattcgattgattgaactttctgtatgcattattctgaagcaagtgcgtagctaaataatgttaattacaccctccatttcccatgctttgcttctctcctttttgttcatcgttgcttgatgattgatctcatccgttctttcacccctgaaacagctagatgaccgagctgttgatgtagtgatgaacaagttgttcaacaactacaagaagtggtgcaaatttttgtcacggaaacatagtttgaggtatataattccttaatcagtttcctctttatgtacattattgtgctgataatcttgcaactgcagaaatcctccaggtgctcaattacaggaagttcagcaacgcagaattttgtacctaggtctttatcttcttatctggggcgaatcagcaaatatccggtttatgccagagtgtctttgctacatttttcacaatgtaatttgcacattcttattatcatatcaagtaccaaatctcattgcaaaaatatatctttgaatgattcttctcaatgtgttcagatggcatatgagttgcatgggttgcttgctggaaatgttagtattgtgactggtgaaaatatcaggccatcttatggtggggatgaggaggctttcttaaagaaagtggtcacacctatctatcgtgtcatcagaaaggtactttgataaattaccattacctgaaattccaagttagtttgttctaaatataattgtggtggtttttcaggaggcaggaaaaagccaacatggaaaaactgcacattcagcatggtgtaattatgatgatctaaatgagtacttctggtctgtttacagccctattttctggtcacatgctgacagccttttcacactttctctgatagatcctactctgtttcaggacacctgattgtttctcactgggatggccaatgcgagatgatggtgacttcttcaaatccgtgcacgattcaaggcctgtagcagtggtacagttcgatataagtctgtcagtatctcttccaaagactttgattaggaggagaatactgacaaataactatttgtaggctggaagctcctcaccaaagggttctagtaaaggcacaggcaagacaaattttgtagagacaagatcgttttggcacatctttcgtagttttgaccgaatgtggaccttctatttgttggctctacaggtactgtgccaaaattttcgattggcttttttctctgtactatggtttttgatggtttgacactctgtgaatcttataatttttaaaccgaacaggcaatgttgatttttgcttggagtgaatattcagtgactcaaatccttcagaaggacctcttatattctctatcaagcatatttgtcacagcagcatttttacagttcctccaaagtatgtttcccatttcaaatacttgttttatgtacaaggcatttttctgatgcatgtaatatttccttttattttttgagaacctgaaatttttagtatgacaagtgatgaatattggcataatttagttccctttatgtatgtaataccttctgcttttgtcaatggcattacggtaagactatgttaagctaggttcccgcgatacagagcactttcacagcagaaagcaactggcaagaacattcatgtagatatctgcaactttaggatctcttctcatatgcattaaactagtgttactataccgagcagtcatgttcttgagatgctctctggtctggaattcttgtggttttaagagggttctggtgcaataacaaattcgtcatccaactgaaactgatattttctttaattttgatggcaggtattttagactttattctgaactttcctggccacattagatgcaagttcattgacgtcgtgagaaatattctgaagatagtagttagtgccgcgtgggctgtgattcttcccattttctatatcagaagtcaaacaaaagtcaatttaccactgaaaaatctggacagatggtttggttatgtgaaaggagtgccacaactatatatcctggctgtggcggtgtacctgatacctaatatgattagtgcaacgctcttcctgtttccgatgtttcgaaggtggatagagagctcggattggcatattgttagactgctactgtggtggtctcaggtattgaattcaatctattttatttgtttatgttctattatgtggaaaattacttatgcagcttatcctcattgtaaatattcatttcaaaatttctgctatgaggcaatttttaataaggtaatatttgataaaatggaactgtattttgtagaatgaatttgtcttgatatccttgccagcttattgtttgtcatagtatcctagagggttgagaaactactgataaaattgtaaactgtaacttgcaaaaagagaaaataatccaatgacttctgatgccagggcagagattatcctgctattttgtcattagtttgaaaaaaacattttatggttagttaaaaagttctcacatgcttgtgaaaattgatagttttcacttctctaacaatatgtgttcaactgaacacatttgctatcccagtaatgaaaatgatattgcaagggtacatatgcacgaaacagggtggaaaacgtgaaggcaatagattattttgtatgcaatgcgtggaagtaaaataactggatgaatttccctggatcataaggcgctgtacatttattcgtttttcatatttctttcttgtgcggcttgctacactacactacactaatggcaatgcccattttccttgttcttgctgtacacgctaattgtataaataactgcagaaacgaatttatgttggccgtggaatgcatgaaagtcaagctgctcttctgaagtaagttactctgttctatttttcttctgttagagctttattctgcagaaaacactcaattctcttctattcaactgagaaggtacacattattttggattttgctgctatgcgcgaagctttccttcagttactttgtccaggtaagttctatgcttagttatttgcaaacatgctttgacgagattaatctgaaacagtttaatttgcagatacaacctcttataaggcctaccaaggatataatgagtgttcataacattcgttatgagtggcatgagttttttccaaacggtaattccaatgctttttttttttgtgccgccttcattctggaaccctttttttactgatacttcgttgccttttcagcatcatataatatcgctgctatcctatccctctgggcccctgttctgttggtatgcacttatccagcctgctagtgtagtgcctatccagcttatgtattagctgaaaagtagcttcatttattcccgtttgtttcaaaactgcattctaaatcttggtttatcaactacaatgcttttattcttgtaggtctatttgatggatacacagatatggtatgccattttctctacaatatccggcggtatgtctggggcacttggacgacttggggaggtaatgataaatctgaactattctctgtaatctgttgttttgctttataatttagaacttataatgaccataagtgtagggcaccccaagattgatggatagctaaggggctttttctttatattgaggagtaaactgaacgtgtcgaggtctcagtcaattgcatgaaacaaatagctcgtactttataaacataacggcgggctatgtagatggtaatacagttttatgcagaatattttgtttgaggaagcttagcgaggtattttaataagtgaaaatcaccttttttgtttttgcagcctgagaattcagaataaactacattagattataatggtaattttaagtagataaatatggaagtgtattcacaaggcaaatgggatattcatttttaggaggatcctctgggagtcgcacttcagtcttgtttctgttatgctgccgtatttacaagaaaacctttttcatattcatgaaatgaagcaaaaaatgtattgctggtggcttggtgtatttatagtcggatattctcctttttaaccgtcgacatttttgtattagcactgccttttttactttgttattgccgtacagcgttgtgtaactttttctttttgcaagagttaagaagctgaacttcatactgttctggtttctgatggagttactacactcttgtaccagattcgaacactaggaatgctgagatcacgatttcactctttgcctggagccttcaatacatatttggtgccatcagacaaaggcagaaacagacgtttttcactctcaaagcgcttcgcagaggtaccaaatgacaataacgaaaattattgtcaagatttctcttataaccccccttaaaagttatgatataatgaagaatttaaagtacaggtttcccccaacaagagaactgaagctgccaagtttgctcaactgtggaatgaagtgatttgcagtttccgcgacgaagattttataagtgataagtgaggcccttagatcatgttcacctagaaaacattatcattgcaatgtagataatggaccttctgttatgcagggagatggacctattggtggttccatactcatcagacccgagcctaaaattgatgcagtggccgttgttcttgcttgctagcaaggtttggcagaacaaatttaatatgtccactctaccttgttacatgtttgtgttcggctcttactggaaatcattttgattgaaatttgcagatacctatagctttagacatggcagcacaatttagaccgagagacagtgatttgtggaagcgtatatgtgctgacgagtatatgaagtgcgctgtaattgaatgctacgagtcattcaaacttgttcttaatttagtggtggttggagaaaatgaaaagaggtatcttcttatacttccattttccactgtttcacgtatctctatgtgagaaagacattgatgttgtttgtcatagcttttaggtattcagttaatgataacactaggaaatactccctccgtcccaaaattcttgtcttagatttgtctagatacggatgtatctaacactaaaatgtaactagatacatccgtatttagacaaatctaagacacgaattttgggatggagggagtatatacttacatccggaatagacattgtgcactatttttcttcaaaaaaatcgttactagtactccctccgttcggaattacttgtcgcggaaatggatgtatttagacgtattttagttctagatacatccatttccgagacaagtaattccgaacggagggagtacctagtaggtttctatgattgtctaaggctcctctgttgacgaatccttgccacttttgagcaagacagggccacccaggaaatcatttgtttcgttccaatatgataaaatcattcttaccataaactgggaaacacgcaggtcagcacaagtatttttgaacatataaagtggtcagacatggctgaatatttgtagtttgaacatgcacgttttcattcgtagtagttgatgcaaaagatcaatacaaatatattactaaaaatctacaaccctatatgataatggggtttgagagttcaagattacaaatacattacttttaccaataaatatatatctggctagttgcgtatggcggcacatcatcactttcaaacttaagaatcaagatattccaaattgaactagggaggaggactgccaagcacctccattgtgcaatatgcatggaagggaaaccatgattagttgtaactgctaaatgtgcaacatgtgttagataggcagccttagtactattgaaggcatctgtgtccatctttcatgttttttttactgcattgttctttatcattgcatgctcactgttatcttgatcttctactgacatgtttgttcactaacttcaacaggattattgggattataatcaaagagattgaagctaacatcgcaaagaatacattccttgccaattttaggatgagcgcattgccagtcctttgcaagaagtttgtggagcttgtatccaccttggtaagcaatgttgttacctctactgaacaccaaccctattgaagattgcattgcttgatatttttttagacaagtaacacgttcgattattgctacgattatgtgatcacatctgcagaaagaaagagacgcctcaaaatttgataatgtagtgctattgcttcaagacatgctggaagtgatcacgagggatatgatggtcaatgagatcaagtaataccttttgcacaaattataatcatacatgtgccttgtcatagaaactggtgactattttttttaacatgtgttgtttacagagaactagctgaatttggtcatgggaacaaggatttagttccaagaagacaactttttgcgggcacaggcacaaaacctgcaattgttttcccaccaccaatttctgcgcagtgggaagaacaagtaataacatcacattcttatttggcttttgtaacaaagaaggttcactaacttcacctatctacagattaagcgcttgtaccttcttttgactgttaaagaatcagcaatggatgtgcctacaaatcttgaagcccgccggagaatatcatttttcactaattcgctattcatggagatgccacgtgcgcctagagtgcgcaaaatgctctctttcaggtttgtctcgtatgtaaactttcaacatatcacagtgttgtccagtccacttttctaaatacaccgcagtatcgaaaatcataatgtctagctaaattagctggattcattggagcctggcagctactggctaatggtccttttactgtgcttcttaaaaagaattatatctgcttgtcaagatatattttgggctgaattatggtatgttcttaactctgatcagtttgaaagaacagaaaacatgaatatttttgggcgtggaattgtgaatttgtgctagtcaggaaagaggaaagcaccattaagaccaaggagaagcttatcaatgttgggattttaactgatttttttgctgtttgatgaactcgtattctgaactaaatggcggggtggtttctaattttcacggtcagttgtttaggatttttttattacaggttattttgatcactgccatcctcatcgtagtcttaaaaaacttcttgctgtcatttgatgtgttgtttaagctaaaaatggaagtatgagtgtcctgatgccattatgtggtattgagttgcttttgaaactgtctttgagtctgccactctcattgtctcagcagatttgcatgccccttctcggtattaactacagagtcggagttttgtgtcttgaccagttaacccaatggcgccatgatcatactagaaccgaagttcatctacagttttgatcagaattcatttaaagttgcattatattacaactgattctgtactcatcagctcatgttcgcttgatggtaaacaaaatttataaacagaagtgttgaacatccacaatgtctggcagtggcactctgtaatcttgttacttgtacaagtacatatgtttccaccttaaaggaaaaatgcacctagatattctaaaaaaataacaagtggtgaacttccaggtggagacctgtacaacagaatgtgtgcgacccatctttaagtgcattcataatcacaaatcaacaacgttaacaccagaaatatattatcagttcacaacaacaaatatctgataaaccgtatggttaaatttgttctgtgatcataagagtttcagcgaaaaagattgggctctagatgattcatatgacacttgttcttcacagtgtaatgacaccatactacagtgaggaaactgtatattcaagaaacgaccttgatctggagaatgaggatggtgtatcaattatattctacctgcagaagatctttccaggttcctttcctatttgatgtgtttaatgcctacagttctttatgaatttgattgccagctttttgtcttctattcttgataatttttgttatatagatgaatgggataatttcatggaaaggattgattgcaaaaaagaaactgaagtttggggaaatgaagaaaatgttcttcaacttcgtcattgggcctctcttagagggcagacactctgtcgaacaggtacttcggccataccctttaaccttgtcaaatatggatcatttagctgattccgtgtttacatgtttttcttattgtgaatagtgagaggcatgatgtattacaggaaagctttgaagcttcaagcattcctagacatggcttctgaatctggtgagcttcttcaacttccaattcgagcattcctagacatgatgcatttagcattcctagacatgttcacaaatataagatgttttggatatttcaatatggactacatgtggactgaaatgagtgaacaaacacagtaagcttctattaataaagttagaacatcttatatttgtgaacggagagggtaccttttacaaatacttcctgattttatattgtagaactaggggagcatccgcaataggtgcaaaaagggggagtttttttcatgagaagagaactaggtctacatattatagcatctttttagaagttagacccaatcttattggacacttggaaggggtctatgcactgaggatgttctagaaggctataggggacttatacaaagtgtccaacatcaccctcttttgtttgcagagatactagaaggctataaagccattgcagatcccgcagaggaagagaagaaaagccaaagatctctgtcttctcagcttgaagctatagcagacatgaaattcacatatgttgctacgtgccagatctatggaaatcagaaacagtcgggtgatcgacatgcaacagatatactgaacttgatggtgcagtaagtgatctcgatgatctattctagaaattaatatacaacatttggccaagtgcgatacatcatgtctaccacaatgagcaaaatgttttcttgtataactctttggagactgtgtgtctcggttatgtttatatttagttcacatttaattgataatgagatgttccttgagggaaaattactgaattgcttcttttattcaaattgttatttccctctgtgcaaagtaatttcagttagaatttgaaactacagttatcctggtctccgcgtggcatacattgatgaagttgaggagagggatggtgagaaggtgcaaaaggtcttctattcggtgctagtaaaagctcttgacaatcacgatcaggtaatcattttacgtgaagcgagttcaaactttcattttggttctgatttaaaccttcaatactcagtagtgcgttatgtacttttttgtcctgtgaaggaaatataccgcataaaattgccagggccagcgaaattaggtgaagggaaacctgaaaaccaaaatcacgcgatcatttttacccgcggagaagctttgcaaaccattgatatgaaccaggtgaacttcatggttatagtacctttttggtaagtaggttgcattctgtcttttgtacttatcaatgctgtttaggacaattatttggaggaagctttgaaaatgcggaatttgctggaagaattcaatgagaaccatggtattcgtcctccaacaattcttggagtacgtgaacacatattcaccggaaggtgtgttttaagctttgcagtaggttttacttagttttctttgtcaaaattgcaaatcaatgcctaacatctgacattgctggattgtagtgtgtcatctcttgcctggtttatgtcaaaccaggaaaccagctttgtgacaataggacagagggttcttgccaatccattgaagtaagtctgaatatactttgatatgtcctatttgaattaagcgcaatccatagttatcatatttatatgctgcaatatgagtagggagtgctgagcatctatggtgactatctcctggatgagcgcttatgtttttttttatcagctcttgaaatgcacacacatgtttgttggagattttagaggcagtaaggcaataaatattaaaacaaccaagtgctatttcctggaactttcctggcataaaatcttttgaagctaaacaatgtcatcaatttaaagtgtatattgtggtctaagtgctgtatatctgacatgctgtttcctgaaactttcctggcatcaaagcttttcaagctaaacaacgtcgccaatttaaagggtgtattattgtgtatgtgctgtatatctgacatgctgtttcctgtcagtaaagcttttcgagctaaaaaatgtcgtcaatttaaaatgtgtattatatctactccctccgttcctaaatataagtctttggagagattccactatgaatcacatacggatgtatgtagatgcattttagaatgtagattcatccattttgctccgtatgtagtccatagtggaatctctacaaagacttatatttaggaacggagggagtaagtgataaatatctgacatgctgtttcctgaaactttcctggctgagcttttcaagctaaacaatgttgttaatttaaagtgtgtggtatggtcattggtcattgctatgtatctgacattctcttttctgggcagggtacgttttcactatggacatcctgatgtgtttgataggatatttcacattacaagaggtggaattagcaaggcttcctgtggtataaacttgagtgaagacatttttgctggtatgtacttttccacctattctaactgttacctgtggatttttgagggaaatttaagaatggataggtccctaggacatccacatcctcgtatatgtgactcaaactgggtttgacaactgattcacacatgggccattatatgggcctcagacagactactctaaacttgattaagacactgatgctactcttatctaacacattaactcacattccaacatttcccatttctgctcttggacaacacaaacttaaattttctttttcaggtttcaactcaactctgaggcgaggaaatgtcacccatcacgagtacattcaagtcggaaaaggacgtgatgttgggttgaatcaaatttcactctttgaggccaaagtggcgtgtggcaatggagaacaagtgcttagcagagatatctaccgtttgggccaccgctttgacttcttccgaatgctctcatgttacttcacaactgtgggattttatgtcagctcaatggtacaaaacatctacctgcatcacatttgtcttgatttgccatcgtccatgttttttgatgttcttattactgtgcagatggttgtcataatagtatatgttttcttgtatgggaggctttatttagccttaagtggacttgagtttgcaattatgaagcaagcacgaatgagaggcaaccgtgctcttgaggcagccatggggtcccaatctattgtgcagctaggtctattgatggccttacccatgtttatggagatcggactggaaaggggttttagaagcgccctgggggatttcatcatcatgcagctacagctatgtgcagtattctttaccttttccctcgggacaaaatcacattattttggccgcacaatcctccacggtggtgcaaaatatagagcaactggcagaggctttgttgttcgccatgtaaagttcgctgaaaattacagaatgtatagcaggagtcactttgtgaaaggacttgagctcatgttactacttgtagtgtatgagctctatggtgatgtggcgacagattccacggcctatgttcttctgacatcatctatgtggttcttggtaatcacatggctgtttgctccattcctcttcaacccatcaggatttgaatggcaaaaggtggtggatgattgggatgattggaacaaatggataagcagccgtggcgggattggtgtgccggccaataaggcctgggagtcgtggtgggaagaggagcaggaacatctgctgtcaacaggcataatcggccgcatatgggaaatcatattatctctccgattcttcatgtttcagtacggtatcatgtaccatctgaatatctctaatggcaacaaaagcatatcagtaagtcatcctttatttttgctagtattttacaactctactcgaactaaatggatttcatgagactgattacatgatctttttgattgtttataatcactgtttactgatacaatttagtgactgtcccttcccaacttgattttgtggcttcagatttatggtctgtcttggctggtcactgtagcagtagtgttggtcctcaaggtaaatttcatttgcttgctgttgatgaaatcaataagtatatattggttggcgtatgcctctagtttatgtccttgttatgctgctgatatgctgccatttccttaggtggtatctatgggaagaaagaaatttagtgctgacttccagcttatgttccggctcctcaaattgttcttgttcattggatctgttggaactttggcgattcttttcacccttctgcaccttacagttggtgacatattcgccagcttccttgcctttgcacccacaggatgggccattctgcaggtacgtcatcactcatcagcaccaaagctttccttttgttttgttttaaggttttactcccagcttatcacgtgcgaggactgaggagtgaggagcagtatcaattcatagggagagagaaacgagagaattttgatcgagttaaagttgctattatcgaaattgacatctttcactggctctaatccgttcggcatcattgcaacagatatcacaggcaagcaagccagtggtgaaggcttttggtctgtggggatctgtgaaggccttgtccagggggtacgagtaccttatggggatcgtgatcttcgtgccagtggcggttctggcatggttcccttttgtctcggagttccagacgaggctgctattcaaccaggcattctcccgaggcctccaaatctctcgcattttggctggcggaaagaagcaaaactgaggcgagtctaggagatgggagatgttccatcacagtaatcacacagggtagacggaggcagaaattagctcgaggttcgttgttggaggggggcatcatatggctgctaacatactgacactttcagaagtttcttagtcttgtacacacagggcagttttccttaggcattttccatgtatatctcatgctaatacactcttacctctgatactagattgtacgttgcttgtatagatagatacatgcccccacaacagttgcgacaaaacattacggtgcttttagaggcaaagatgaaactgattttttgtgcatgaagcaacaaaacagttcggtctttctagattgagagatcaaatcgatttttgtgcatgaagatgtttgtgttgtgctgtacggtgtaccagtcagttccctgctttgtgcttgtgttgtctgaaactctgaatttaggctgatgtttgaacgcgctggcatttcccagctggaacctctgctttctataaaaaacaggcctgtatggcctttctaaaaatagtctgaattgatattacgtgagatctgtttttctagaatacaagagtaccttgcactggttcggactgttgcagcatatgagcataacataagttggacggctttttgcgttatgtttcatgcgtagacaaggataatgggacagaggttgtgaattatgacggtaggtacaactttacattaggtgaaggctgacatgagttaagatggaggacctgagtctgttatccttccagctttaagcaggccacctcacgtaatctgaattcacaaatgagctgaagcaacatcgattgcaatcataggagaccgatacagctttcagcttgtccctgcccgatgtctaatgattctccaagcgcagactgccaattaagtacacacgaggtgactgaaatcccacaacgacggtcatgatatcacaggaaaatttatatttttctgctttttaaaagttttttttctgcttttttgtttcccagctattgctgcattttggttcgagccatcatttctacggtcgggctgcttttgtagggtcagcgtgttttccgcgacaaattctcattgtgcctatcccgtcccccttcgcccactaggcaagaactctcagtgtcgtgactaggttttgacgtgcagagagtacacgacgcgtgatcgtgaggccaacacccaacagtatcctaggccctaacgcatggaaaccaagtgaccgagcgagaagagaatggaggcccagaatctttggtggaaagaaacgacgtggttgtcatgtacttatgctgattacaaaattgcaaagtctggtcagaaccatcatttggtcggcattgagagttttccttctttttgaatggacaggaattgagagttgatggtgcatggtgccatttaagcgatgttcaaacgggagctgtaaatcatcccgcattcggaaattattaaaccaatggcagttcatgggcaggcaaagccctgcacgaatcttggcggctcgcatcctctattgcagctttgagtggccgtagatttgcaaaagcaatggctaacagacacatattctgccaaaccccaagaaggataatcacttttcttagataaaaaagaacagaccaatatacaaacatccacacttctgcaaacaatacatcagaactaggattacgccgattacgtggctttagcagactgtccaaaaatctgttttgcaaagctccaattgctccttgcttatccagcttcttttgtgttggcaaactgcgcttttccaaccgattttgttcttctcgcgctttcttcttaggctaaacaaacctcaccgtgcacgcagccatggtcctgaaccttcacctcgtccctataaaagcctagccaaccttcacaatcttatcatcacccacaacaccgagcaccacaaactagagatccgaattcctgcagcccatcccaccatgcggaagttctccgaaatagctactcagcggtgtggtaatcgatcaatggcgctatcagctcctcccagtcaggaacagccgtcggggaagcaattcggctaccagctcgctgctgctgtgaggagcatcaactggacttatggcatattttggtccatttccgccagcccgcgcccaggccactcctcagttctggcgtggaaggatgggttctacaacggcgagataaagactagaaagattaccggctcgaccactacggagcttacagcggacgagcgcgtcatgcacagaagcaagcaactgagggagctctacgaatcgctcttgcccggcaactccaacaaccgggcaaggcgaccaaccgcctcactgtcaccggaggatctcggggacggcgagtggtattacaccataagcatgacttacaccttccaccctaatcaagggttgccaggcaaaagctttgcgagcaatcaacatgtttggctgtacaacgctcaatacgcaaacaccagagttttcccccgcgcgctcttagcaaagacaatcgtttgcattcccttcatgggcggtgtgcttgagctcggaacgtcggatcaggtgttggaggacccgagcatggtgaagcggatcagcacgtctttctgggagctgcacttgccgtcatccttggagtcgaaggatccgagctccagcacatcagcaaacgataccagggaggccaccgacatcatcttgttcgaggatttcgaccacaacgacacagttgagggggtgatctctgagcaaagggaggtccagtgcccgtccaacgtcaatctggagcgcctcacaaagcagatggacgagttccacagccttctcggtggactggacgtgcatcctctcgaagacagatggatcatggacgagccctttgagtttacgttttccccagaagtggcgccggctatggatatgccgagcaccgacgatgtcatcgtcactttaagtaggtccgaaggctctcgtccatcctgcttcacagcgtggaagggatcatccgagtcgaaatacgtggctggccaggtcgttggggagtcacagaagttgctgaataaagttgtggctggtggtgcatgggcgagcaattatggcggtcgcaccatggtgagagctcagggaattaacagcaacacccatgtcatgacagagagaagacgccgggagaaactcaacgagatgttcctggttctcaagtcactggtcccgtccattcacaaggtagacaaagcatccatcctcacagaaacgataggttatcttagagaactgaagcaaagggtagatcagctagaatccagccggtcaccgtctcacccaaaagaaacaacaggaccgagcagaagccatgtcgtcggcgctaggaagaagatagtctcggccggatccaagaggaaggcgccagggctggagagcccgagcaatgtcgtgaacgtgacgatgctggacaaggtggtgctgttggaggtgcagtgcccgtggaaggagctgctgatgacacaagtgtttgacgccatcaagagcctctgtctggacgttgtctccgtgcaggcatccacatcaggtggccgtcttgacctcaagatacgagctaatcagcagcttgcggtcggttctgctatggtggcacctggggcaatcaccgaaacacttcagaaagctatataggcaagatgttttttgacattagtgtagtgctaaaaccgtcttatatttgggacgaagggagtacttagcgacgcaatctacaaaaaatcatgagttgggctctatagtcttcttcacccaggaatcaggtcggactagtgtgaattactgtacaccaaaaaaaaattccgaaataattactgaacacgtcatgacctcgccccaaaaaatatccagatctatattccgcctatcaattaagcacgaagtttgaagggagtgcctagaactcatttagatgagatataatttggtctcattcaccttgaaaacgaaaacaaaaacaacccacgtcagcacacacgcatcttatagcatcacatccaatggctataaaaggtgaatgacagcaaattatacctcatctagatgagttctagcaaaactgtaatttgaagccgactatgctgcccgaccctactcactactacagaaatgcctagctagcggtggcggcactaagagcccattcggattctttccagcttcctgcgatgccagccacagccagcttctgatgggatgggagtagcgtttcgttcgacagcagagggtagctctgaagttcctattctctagaaagtataggaacttcggtcgagtcattcatatgcttgagaagagagtcgggatagtccaaaataaaacaaaggtaagattacctggtcaaaagtgaaaacatcagttaaaaggtggtataaagtaaaatatcggtaataaaaggtggcccaaagtgaaatttactcttttctactattataaaaattgaggatgtttttgtcggtactttgatacgtcatttttgtatgaattggtttttaagtttattcgcttttggaaatgcatatctgtatttgagtcgggttttaagttcgtttgcttttgtaaatacagagggatttgtataagaaatatctttaaaaaaacccatatgctaatttgacataatttttgagaaaaatatatattcaggcgaattctcacaatgaacaataataagattaaaatagctttcccccgttgcagcgcatgggtattttttctagtaaaaataaaagataaacttagactccaaacatttacaaaaacaacccctaaagttcctaaagcccaaagtgctatccacgatccatagcaagcccagcccaacccaacccaacccaacccaccccagtccagccaactggacaatagtctccacacccccccactatcaccgtgagttgtccgcacgcaccgcacgtctcgctgcccaaaaaaaaaaaaggaaggaaaaaaaggaaaaggaaaaacagcaggtgggtccgggtcgtgggggccggaaacgcgaggaggatcgcgagccagcgacgaggccggccctccctccgcttccaaagaaacgccccccatcgccactatatacatacccccccctctcctcccatccccccaaccctaccaccaccaccaccaccacctccacctcctcccccctcgctgccggacgacgagctcctcccccctccccctccgccgccgccgcgccggtaaccaccccgcccctctcctctttctttctccgttttttttttccgtctcggtctcgatctttggccttggtagtttgggtgggcgagaggcggcttcgtgcgcgcccagatcggtgcgcgggaggggcgggatctcgcggctggggctctcgccggcgtggatccggcccggatctcgcggggaatggggctctcggatgtagatctgcgatccgccgttgttgggggagatgatggggggtttaaaatttccgccatgctaaacaagatcaggaagaggggaaaagggcactatggtttatatttttatatatttctgctgcttcgtcaggcttagatgtgctagatctttctttcttctttttgtgggtagaatttgaatccctcagcattgttcatcggtagtttttcttttcatgatttgtgacaaatgcagcctcgtgcggagcttttttgtaggtagacgataagcttgatgatccgtcgatcgtttcgcatgattgaacaagatggattgcacgcaggttctccggccgcttgggtggagaggctattcggctatgactgggcacaacagacaatcggctgctctgatgccgccgtgttccggctgtcagcgcaggggcgcccggttctttttgtcaagaccgacctgtccggtgccctgaatgaactgcaggacgaggcagcgcggctatcgtggctggccacgacgggcgttccttgcgcagctgtgctcgacgttgtcactgaagcgggaagggactggctgctattgggcgaagtgccggggcaggatctcctgtcatctcaccttgctcctgccgagaaagtatccatcatggctgatgcaatgcggcggctgcatacgcttgatccggctacctgcccattcgaccaccaagcgaaacatcgcatcgagcgagcacgtactcggatggaagccggtcttgtcgatcaggatgatctggacgaagagcatcaggggctcgcgccagccgaactgttcgccaggctcaaggcgcgcatgcccgacggcgaggatctcgtcgtgacccatggcgatgcctgcttgccgaatatcatggtggaaaatggccgcttttctggattcatcgactgtggccggctgggtgtggcggaccgctatcaggacatagcgttggctacccgtgatattgctgaagagcttggcggcgaatgggctgaccgcttcctcgtgctttacggtatcgccgctcccgattcgcagcgcatcgccttctatcgccttcttgacgagttcttctgagcgggactctggggttcgaaatgaccgaccaagcgacgcccaacctgccatcacgagatttcgattccaccgccgccttctatgaaaggttgggcttcggaatcgttttccgggacgccggctggatgatcctccagcgcggggatctcatgctggagttcttcgcccacccccggatccccgatcgttcaaacatttggcaataaagtttcttaagattgaatcctgttgccggtcttgcgatgattatcatataatttctgttgaattacgttaagcatgtaataattaacatgtaatgcatgacgttatttatgagatgggtttttatgattagagtcccgcaattatacatttaatacgcgatagaaaacaaaatatagcgcgcaaactaggataaattatcgcgcgcggtgtcatctatgttactagatcataacttcgtataatgtatgctatacgaagttatacaaaggagccaaaacgaagcgagttcatcggagtagtggacgggggcgcctctttggtagaactatctaccctgaataccaagagattctcaagcgaacaagagttagtaagactgctatttctaacagtttttcttaatccctgcaccaaaaaacagtttttcttaatagtcttgctaaatctctgtcgaccaagtcttcgttatgtctcgaccgatgctatagtcgtgagatcttatattgagatcatgctaaattatcctttcagtttttcttttttgtttatacatgttatgtcacttgcagtcgactgaaaccttgatacactttctttttcttagtataaattgctggtttcacaatgggtgatgaaagaaaacctcaaaactagcacaagctccaatcatgcatggtcaccgtcgatcgttcaggcagcagcaacaaagacaagctccaagaatagccatgtccagttggtctcgtgcagaatgacttgcgtcaatggtggacgagcccccaaacatagcacgccgacgcccgggtcaaaccggcttaaacttggcatggcgccacccaccaccgcttaacccccgcccatttctccctccccctcaagtctcctccgcccccttccctctcctccgattggccccgcccaaccagagagagggcgagagggcgccaccccagccaggccaccacaataacaaaaatcagcacgacgtccccggcgtcgggcgctgctcgtcgaggtggcggcggcggcggcggtgctgacgtgaccggcggcacaacggcagcgtggcggcgagggtgacgaggagaagcaccgcgcccaagatggtgcgccgcgggacgttcccgctggcgctgctggccgtgctggcgacgctgacggccgtggcggggcaggggaagccggtcacggacaacggctcgggcggcgcgtcggggccggccaagttcacgcccaaggacgccttctacatcgactgcggcggcacggccgccgccgacaccaaggacggcaagtccttcaagaccgacgcggaggccaacagcctgctctccgccagggacaacatcaaggtcgccgacgacaaggccgacgtgccgtcgcacctctaccgcagcgcgcgggtcttcaaggaggaggccgtctacaacttcccgctcacggcccccggctggcacttcatccggctctacttcttccccatcaagagcggggaggccgacctcgcggcggccacgttcgacgtgaccaccgccgtgaacgtccttctccatggcttcaccgccgaggcgaaggcggtcatgaaggagtacgtcgtcaacgccacggagaacaagctcgagctcaagttcaccccgcagtcgggcgcggcgttcatcaacgccatcgaggtcgtcaacgcccctgacgagctcatcagtaagacggccctgacggtgtcgccgctagccgagacaagcgggctgtcagaggctgcctaccaggtggtgtgccggctcaacgtcggtggcccgcccatcggccccgtgaacgacacgctcggccggcagtgggaggacgacgggcagtacctgaaccccaaggaggccggggcggaggtgtcggtgccgacgagcgcgatcaagtaccccgacgcgttcccggcgaccaagctcgtggcacccacggcggtgtacgcgaccgcccgccacatggctgaatccggcgtcgcgaaccagaacttcaacgtgtcgtggaaggtggacgtggacccgtcgttcgactatctcgtccgcctcttcttcgccgacattataagcacgtccgccaacgacctatacttcaacgtgtacatcaacggccgcaaggccatctccgccctggacctctccaccatcaccggcgacctggccgcgccctactacaaggacttcgtggtgaactcgtcggtcaataccgacggccacatcatcatcgacgtcgggccgctagggcaggacacgggccgcaacgacgcgctgctcaacggcgcggaggtgctcaagatgaccaactcggtgggcagcctggacggcgagtacggcgtggacggccggatggtggacgacggcagcggcacccgcaaggtggtggcggccgtggggttcgccatgatgttcggcgccttcgccggcctgggatgcatggtggtgaagtggcatcggcggccgcaggactgggagcggcgcaacagcttctcgtcgtggctgctgccgatccacacgggccagtccttcagcaacggcaagtccaagagcggttacaccttctcctccaccgcggggctgggccacttcttcaccttcgcggagatgtcagaggcgaccaagaacttcgccgagagcgccatcatcggcgtgggagggttcggcaacgtgtacgtgggcgagatcaacgaccccgacgaggagggctccaggatcaaggtggccatcaagcgcgggaacccgtcgtcggagcagggcatcaacgagttcaacaccgagatccagatgctgtccaagctccggcaccgccacctcgtctccctcatcggctactgcgacgagggcgaggagatgatcctcgtctacgagttcatgcagcacgggcccttccgcgaccacatctacggcgggcccgagggcctgcccacgctctcctggaagcagcgcctcgagatctgcatcggcgccgccaggggcctccactacctccacaccggcaccgcgcacgggatcatccaccgcgacgtcaagaccaccaacatcctcctcgatgacaagttcgtggccaaggtggccgacttcggcctctccaaggacggccccgggatgaaccagctgcacgtcagcaccgccgtcaagggcagcttcgggtacctcgacccggagtacttccggtgccagcagctgaccgacaagtccgacgtctactcattcggggtggtgctgctggagacgctgtgcgcgcgggcgcccatcgacccgcagctgccgcgcgagcaggtcagcctcgccgagtggggcctgcagtggaagcgcaagggcctcatcgagaagatcatggaccccaacctcgccggcaaggtcaacccggagtcgctcgccaagttcgccgagaccgccgagaagtgcctctgcgagttcggcagcgaccgcctctccatgggcgacgtgctctggaacctcgagtacgcgctgcagctgcaggagtccaacccacccgagggcgccagcgacgccgacgacgccgacgcctccatcgtctcctccgccagcggcgtcaccaccgtgcccgaccaatccaccacctccgccaacgagctcttcgcgcagctcgccgacatgaagggcaggtgatccatccatcttctgcatcgatgcatgatccatacctccatgcgtcgccgtcagtcctcaccgatcgagcagccatgagcagcaccgccgtagttcgtcaatccgtgcgcgcgccttctgcatgcatgctagtccatgcatgcatccatggtggaacggatgaaggaaggatccgatcatcataactcaaaaccaaacgaggtcgatcgaagagtgtatatgtgtgtaatgtatgtatgtgtctcaatcgcgtttactgatggcagaaaattccaaaatgtataccgcaactgtatgtaaaatcatggcgtcaattacactttgtctcacaaaaagtgttgattttgttagcatgcattcagctcagctcatttctcttttttccccgcaaaagggagctcatttctcataatatttgatggggctaattaggagttccagacagaaagctgaggatcttgttatcgaattttctatgtacgtatgagattatattgtcaaattttctatggaacaaaataagagtcctggtcctcctggtggtttcccattgagttctaccacatatgataagagtttgattaaatggtgtctaaaagctatgattgatgatttccatagaagtaacattaacattgctaccttgaactatggaattatcacattgaatcctaaaaccagtgatgctaaacaaattcaaaattgctggtcaattttcctcttggatgttagtttcaaaattttcactaaaatgtttatgaatagattgagtgggtggtgagtcctccaatttctcttagacaaactgcttttattaaaggtaggtacattgtggaagggtccatatcctacatgaagtcatgaacactataaatgctaaaatatcaaagtgctatgattttcaaagtggactttaaaaaagcatatgacaaatttaaatggtcttttgaacataagatatcgagtttaaaaagttttccagatatatcgaactggttgtgaaaagctatgtttgatgatttccatggaggtgacattaacattgctacgttgaactatggaattatcacattgattcctaaaattagtgatgctacacaaattcaaaattttaggcccatttctgtcttggaagttcctattctctagaaagtataggaacttcggcaggatatattcaattgtaaa

SEQ ID NO: 233 - skipped

SEQ ID NO: 234 - DNA, 53 bp, synthetic construct
  source 1..53: mol_type = other DNA
gagatcccgcgggctgctgctggtggcggggctgctggcggcgctgctgccgg

SEQ ID NO: 235 - DNA, 23 bp, synthetic construct
  source 1..23: mol_type = other DNA
ccgcgggctgctgctggtggcgg

SEQ ID NO: 236 - DNA, 23 bp, synthetic construct
  source 1..23: mol_type = other DNA
gagatcccgcgggctgctgctgg

SEQ ID NO: 237 - DNA, 23 bp, synthetic construct
  source 1..23: mol_type = other DNA
gctgctggcggcgctgctgccgg

SEQ ID NO: 238 - DNA, 2019 bp, Hordeum vulgare
  source 1..2019: mol_type = unassigned DNA
atggcggagccggaggacggcggcgaggtggcccctcctgaggcggcggcagcgacgaacgcagccgctgattcgtctccccctgttaaggaggagccggcgccagcggcagaggcaaagccggccagctctggcgaaggggtctccctcaactatgaggaagcgagagctctcttgggaaggctggaatttcagaaaggcaatgtagaagctgcactttgtgtgtttgatggaatagaccttcaagctgccattgagcgctttcaaccatcatcctcgaagaaaacaacagaagctactctcgttcttgaagccatttacttgaaagcattgtcccttcagaagctaggaaaatcaacagatgccgctcaacaatgcaaaagcgtcatcgattctgttgaaagtatgttcaagaatggcactcctgacatcgaacaaaagctacaagaaactatcaataaatctgtggaacttctcccggaggcctggaaaaaagctggttctcttcaggaaacatttgctgcgtacagacgcgctcttctcagcccgtggaacctcgacgaggaatgcatcacaaggattcaaaagagatttgctgttttcttgttgtatggttgtgtggagggaagcccacccagctccggttcaccagctgaaggcacttttgccccaaagactaacattgaggaagccattctactcctcacaatattattgaagaagtggtatcaaggaaagacccactgggatccctcggtgatggaacatttgacctacgcgttgtcgatttgcagccaaccatctcttattgcaaatcatctcgaggaggttttacctgggatatatccccggacggagagatggaacacactagcattttgctattatgccgttggccagaaagaggtggctctgaatttcttgaggaagtccttgaataagcacgagaacccaaaagatacaatggcattgttgttagctgccaagatatgtagcgaggaccgccgtcttgcttccgagggtgtggagtacgcgagaagagcgactgcaaacactgaatcattagatgttcatctgaagagcaccggcctccatttcttggggagttgcctgagtaagaaggctaagactgtttcatccgatcaccaaagagctatgttgcagacagaaactatgaagtcgcttacggaggcgatgtctcttgaccgcaacaatcctaacctaatattcgacatgggagtcgaatacgccgagcaacggaacatgaatgccgcactgagatgtgccagggagtttatcgacgcaaccggcgcatcggtctcgaaaggttggaggtttctagcactagtcctgtccgcgcagcaaagatactccgaagcagaagtggcgaccaatgccgcgttagacgagacggcaaagtgggatcaagggtcactgctcaggataaaggctaagttgaaggtcgcccaatcatcgcccatggaggcggtggaggcataccgggtccttcttgctcttgttcaggcccagaagaattcgcctaaaaaagttgagggagaggctgatgcagttaccgagttcgaaatctggcaaggtcttgcaaatctctactccagcctctcacactgcagggacgccgaggtatgtttgcagaaagccagagccctgaaattgtactccgccgcgacactcgaagccgaaggttacatgcacgaggtgcgcaaggagagcaaggaggcgttggcggcctacgtgaacgcctcggcgatggagttggagtacgtgtcgtccaaggtggccatcggggcgctgctctccaagcaggggggcaagtacctcccggcggcgagggccttcctctcggacgccctgagggtcgagccgacgaaccggatggcgtggctcaacctggggaaggtgcacaagctcgacgggaggatagccgacgccgccgactgcttccaggcggcggtgatgctcgaggagtcggatcccgtggagagctttaggacgctctga

SEQ ID NO: 239 - DNA, 4565 bp, Hordeum vulgare
  source 1..4565: mol_type = unassigned DNA
gacggcaatagtggtcgtccggtggtgaagagacaatctttctgagcgagccaaatgatttagatctattatcaatgttcaccggaaaaaaaacaccttgttgtttcaattttgcaaaaagaaaatcagatctattatcaacgttcgtcagaaaatgatttagatattatcaatgttcaccagaaaaaaaaagcaccttttgctttgctcttgagcaaaaagaaaaaaaatgagagggaaaaacacaccatattgtttctcttttgcagacaagggcaagataaatgttatggaatcgatcacatcttggtaacatatgtggccgttcaagatcaatgtgttgaccacgcccacgatccacgcatgcatttgtattggcggagctaggcaaactatttttagcttttctcttagaaaaaattctatcattagctcgaattttctggaaagacttgtaaggactcccttaaatttctatcggtattcctgatgaactttacacgtggcaacaagcactagagagagtagtcgcaaaagactaaaaatagaagacagaaagattagtggaaaagggtacacatgcgaaccgtgaaagaagttgccgcctccgcttctctccattgacgacgaaaccgagcacctcccagctcgacgaaatcgggtgcccgtcagtgcgatccctctgctgcattggcatggcggagccggaggacggcggcgaggtggcccctcctgaggcggcggcagcgacgaacgcagccgctgattcgtctccccctgttaaggaggagccggcgccagcggcagaggcaaagccggccagctctggcgaaggggtctccctcaactatgaggtccgaaatatctgaaattctttttatgaatgtttgtttcttaatacggtgcttgtcctattttttatattttttttgcgggcgtgcttatcctatataatgctgctatgctgtgaatttggttgacaagaagttgccgtgtttgaagtgttttgtcaaggccaccaaaatgttatgtcaaatttcgcattgtcggcgatgatgatgtcaattcaattaagctgcatttcgactatgattgttcttgcatgaaccaaaatgtaaagatcccaatattggtcgtgcatttttgttttccgaaaaatgttgtttgagaggctttgtgtgggaaatttgttcctttcttggggatgccaagtgctgaagtgtgatttcatttcgattctggttctagttcattgattggtttataagacatggaccttttttgttctttaaatatttggatgagtgaactataacacgatggtgtcaatcaaaatgcttttttattggctgagtgaattgtgaataatcttaatgccagtataggtagcatgatatactgaataatgtgtaatcatacggagaaagggacattttctttgtccatgttatgttcaagaactgatcatatttctattcccatgaaccgtgctattgtatctccactgcaattaaaaaatgaagttcaaacttagcttaacacatgttgaattccaaccgtcatgctttttccggtttattatgtaataaagtttttttttcctttttgcgggtttattacaccaagttcgtttatacatctatctataacaggaagcgagagctctcttgggaaggctggaatttcagaaaggcaatgtagaagctgcactttgtgtgtttgatggaatagaccttcaagctgccattgagcgctttcaaccatcatcctcgaagaaaacaacagaagctactctcgttcttgaagccatttacttgaaagcattgtcccttcagaagctaggaaaatcaacaggtaaaaaaatgctttataccaccatcgtgttttacaaaaataaattaccatgtggaagctgttttgtttttagcttatgtttgaccttgtaacaacttattgaaataccttttgaacatgcagatgccgctcaacaatgcaaaagcgtcatcgattctgttgaaagtatgttcaagaatggcactcctgacatcgaacaaaagctacaagaaactatcaataaatctgtggaacttctcccggaggcctggaaaaaagctggttctcttcaggaaacatttgctgcgtacagacgcgctcttctcagcccgtggaacctcgacgaggaatgcatcacaaggattcaaaagagatttgctgttttcttgttgtatggttgtgtggagggaagcccacccagctccggttcaccagctgaaggcacttttgccccaaagactaacattgaggaagccattctactcctcacaatattattgaagaagtggtatcaaggaaagacccactgggatccctcggtgatggaacatttgacctacgcgttgtcgatttgcagccaaccatctcttattgcaaatcatctcgaggaggttttacctgggatatatccccggacggagagatggaacacactagcattttgctattatgccgttggccagaaagaggtggctctgaatttcttgaggaagtccttgaataagcacgagaacccaaaagatacaatggcattgttgttagctgccaagatatgtagcgaggaccgccgtcttgcttccgagggtgtggagtacgcgagaagagcgactgcaaacactgaatcattagatgttcatctgaagagcaccggcctccatttcttggggagttgcctgagtaagaaggctaagactgtttcatccgatcaccaaagagctatgttgcagacagaaactatgaagtcgcttacggaggcgatgtctcttgaccgcaacaatcctaacctaatattcgacatgggagtcgaatacgccgagcaacggaacatgaatgccgcactgagatgtgccagggagtttatcgacgcaaccggcgcatcggtctcgaaaggttggaggtttctagcactagtcctgtccgcgcagcaaagatactccgaagcagaagtggcgaccaatgccgcgttagacgagacggcaaagtgggatcaagggtcactgctcaggataaaggctaagttgaaggtcgcccaatcatcgcccatggaggcggtggaggcataccgggtccttcttgctcttgttcaggcccagaagaattcgcctaaaaaagttgaggttcgtgttcttaatcaaatcaaatgcagcaaaagaagaaaagaaaaagcaccatccgtatgctagctgtttttctcttggcactctcttctcggttagttcacttcacatactgatgatgatcgattcagggagaggctgatgcagttaccgagttcgaaatctggcaaggtcttgcaaatctctactccagcctctcacactgcagggacgccgaggtatgtttgcagaaagccagagccctgaaattgtactccgccgcgacactcgaagccgaaggtgagctagcccaaggttcaggtcaccaaacccttacaaaatttcaccccgaccgacgcacgattcgatgcaatgcaggttacatgcacgaggtgcgcaaggagagcaaggaggcgttggcggcctacgtgaacgcctcggcgatggagttggagtacgtgtcgtccaaggtggccatcggggcgctgctctccaagcaggggggcaagtacctcccggcggcgagggccttcctctcggacgccctgagggtcgagccgacgaaccggatggcgtggctcaacctggggaaggtgcacaagctcgacgggaggatagccgacgccgccgactgcttccaggcggcggtgatgctcgaggagtcggatcccgtggagagctttaggacgctctgatgagattatcacagctatatatgaagtcctcactttcttttaccctccgcgttacacttacacctctactctccttgtttatctctcctgttgtactagttcaatgaatgtaaagttaaccaatgtgtatacccctttctgatctcgtggtggggaggaggcactagtggaaaacgggcctttggccgggaccctttagtcccggcctgcctctgggccgagactaaaggtccggccacgtcgccccaattctgaatgcctccctcgaggctttagtcccggcccgtaaggagcctttagtcccggttcgtgtcccaaaccgggactaaagggctacgcggtgggcagtggtggtggcaaccgttcgtatccccctttagtcccggttggtggctcaacccgggactaaaggcctaacacgtggtctgccgtagtggtggcaaccgttggtatacctctttagtcccggttggtggctcaacccgaaactaaaggcccaaacggtttgcatcccgcgtcgtttcgggcgatgaaaagcacgaaccggagcagagtcgccatttctctgtttcttcttctctctcgctctcgctctctgttcttctcctctcttcttcccttcttttcttccaccatgccaactccctttgaagaggtgctcgcacatggcacgaccatgctcgatgtcgtgtacacgaacgagagcagggagatgccgttt

SEQ ID NO: 240 - protein, 672 aa, Hordeum vulgare
MAEPEDGGEVAPPEAAAATNAAADSSPPVKEEPAPAAEAKPASSGEGVSLNYEEARALLGRLEFQKGNVEAALCVFDGIDLQAAIERFQPSSSKKTTEATLVLEAIYLKALSLQKLGKSTDAAQQCKSVIDSVESMFKNGTPDIEQKLQETINKSVELLPEAWKKAGSLQETFAAYRRALLSPWNLDEECITRIQKRFAVFLLYGCVEGSPPSSGSPAEGTFAPKTNIEEAILLLTILLKKWYQGKTHWDPSVMEHLTYALSICSQPSLIANHLEEVLPGIYPRTERWNTLAFCYYAVGQKEVALNFLRKSLNKHENPKDTMALLLAAKICSEDRRLASEGVEYARRATANTESLDVHLKSTGLHFLGSCLSKKAKTVSSDHQRAMLQTETMKSLTEAMSLDRNNPNLIFDMGVEYAEQRNMNAALRCAREFIDATGASVSKGWRFLALVLSAQQRYSEAEVATNAALDETAKWDQGSLLRIKAKLKVAQSSPMEAVEAYRVLLALVQAQKNSPKKVEGEADAVTEFEIWQGLANLYSSLSHCRDAEVCLQKARALKLYSAATLEAEGYMHEVRKESKEALAAYVNASAMELEYVSSKVAIGALLSKQGGKYLPAARAFLSDALRVEPTNRMAWLNLGKVHKLDGRIADAADCFQAAVMLEESDPVESFRTL

SEQ ID NO: 241 - DNA, 2676 bp, Hordeum vulgare
  source 1..2676: mol_type = unassigned DNA
atggcggccgcccgtggccgaggcgtcctgctcgccgtcctcttggcggtggcgttggcgttggtgtcggtcggcgccgacatatacaagccgacggactccattctggtcgactgcgggtcggacaaggaagggcaggacgaggacggccgcaagtggaccagcgacaaggacagcaagtttctccccgacggtggcaagtcgtccatcacggccaccgccgacatcaatgacccgtcgctcccctcctccgtgccctacatgacggcgcgcgtcttccccaaggagaccgcctacacgttccccgtctccgacgccgaccggcactgggtgcgcctccacttctacccggcgtcgtaccacgacatccccgccgaccacttcttcttctccgtcaccacctccaccggcgtgacgctgctccgcaacttcagcgtctacgtcaccgccaaggccctcacacaggggtacatcgtccgggagttctccctccctccctccaccaccggctcgctgtcgctcaagttcacgcccaccgccatgaacaacgcctcctacgccttcgtcaacggcatagagatcctgtccatgcccaacatcttcgccgacccggcccagctggtgggcctgggcgaccagaccctggacgccagcgccggcaacatgcagaccatgtaccggctcaccgccggcggctcctacatcccggccaccaaggactcggggctgtcccgcgagtggttccccgacacaccctacatctacggcgccgccacgggggtcacctacgaggccaacgacacggtccccatcaagtaccccagccccgccgccgagtacctggcgccgcagagcgtctacgacaccagccgccacatgggccgcgacggcaacgtcaacagggtcaacaacctcacctgggccttcgaggtggacggcaacttcacctacctcgttcgcctccacttctgctcgctcatggaggacaagatcaaccaggtcgtcttcagcatcttggtcaacaacaagacggccaccaccaccggcagcgccgacatcatcgcctgggccaaggagaagaaccctgacagccccgggaaaggggtgccggtcatcagggactacgccgtgttcacggccgccgctccggccggcgccgacagcgtcctgtgggtgacgctgcgccccgacctcaccaccaccccgcagttcgtcaacgctttcctcaacggcctggaggtgttcaagacgagcgacgcctccagcaacctggccggcccgaacccggacatctccaagatgctggcggaggcggaggcggaggccgatgacgtggaaggggagttcagggagagggcgagcaacgtgggcgcgctgatcggcggggcagcgggcggcgctgcggcgttcgggctggtggcgggcttgtgcttcgtggcgtaccagagcaagaagaggaaggagctgagcaacagccggtcgcactcgtcgtccgggtggctgccggtgtacggcggcggagggaactcgcagacgagcgtgagcaagtcgtcgggcggcaggagcgcggtgacgctgaaccccaacatcacagccatgtgccggcacttctcgctccaggagataaagtcggcgaccaaggggttcgacgagtcgctggtgatcggcgtgggcgggttcgggaaggtgtaccgcggggtggtggacggggacaccaaggtggccatcaagcgtagcaacccgtcgtcggagcaaggggtgctggagttccagacggagatcgagatgctgtccaagctgcggcacaagcacctggtgtccctcatcggctgctgcgaggacaacggcgagatgatcctcgtctacgactacatggggcacggcacgctgcgggagcacctctacaagagcggcaagccgccgctgttgtggaggcagaggctggagatcctcatcggcgccgcacgggggctacactacctgcacaccggcgccaagtacaccatcatccaccgcgacgtcaagaccaccaacatcctcgtcgacgacaaatgggtggccaaggtctccgacttcggcctctccaagacggggccgacggtgcagaaccagacgcacgtcagcaccatggtgaagggcagcttcgggtacctggacccggagtacttccgccggcagaagctgacggagaagtcggacgtctactccttcggggtggtgctgttcgaggtgctgtgcgcgcggccggcgctcaacccgagcctgccgcgggagcaggtcagcctggcggaccacgcgctcagctgccagcgcaggggcacgctggaggagatcatcgacccggtgctggaagggaaggtggcgcccgactgcctcaagaagttcgccgagacggcagagaagtgcctgtcggaccagggcgtcgaccgcccctccatgggcgacgtgctctggaacctcgagttcgcgctgcagatgcaggacacattcgacaacggaggcaagccgcccgaggtcgacgactacagcagcagcttcacaatcacaccgccgtccatggaggagagcctcgccgccaacgccgccgcgctgtcgctcatcagcgaggacatggacgaggaggacatcgccaacagcgtcgtcttctcacagctcacgcacccaaccggacgatga

SEQ ID NO: 242 - protein, 891 aa, Hordeum vulgare
MAAARGRGVLLAVLLAVALALVSVGADIYKPTDSILVDCGSDKEGQDEDGRKWTSDKDSKFLPDGGKSSITATADINDPSLPSSVPYMTARVFPKETAYTFPVSDADRHWVRLHFYPASYHDIPADHFFFSVTTSTGVTLLRNFSVYVTAKALTQGYIVREFSLPPSTTGSLSLKFTPTAMNNASYAFVNGIEILSMPNIFADPAQLVGLGDQTLDASAGNMQTMYRLTAGGSYIPATKDSGLSREWFPDTPYIYGAATGVTYEANDTVPIKYPSPAAEYLAPQSVYDTSRHMGRDGNVNRVNNLTWAFEVDGNFTYLVRLHFCSLMEDKINQVVFSILVNNKTATTTGSADIIAWAKEKNPDSPGKGVPVIRDYAVFTAAAPAGADSVLWVTLRPDLTTTPQFVNAFLNGLEVFKTSDASSNLAGPNPDISKMLAEAEAEADDVEGEFRERASNVGALIGGAAGGAAAFGLVAGLCFVAYQSKKRKELSNSRSHSSSGWLPVYGGGGNSQTSVSKSSGGRSAVTLNPNITAMCRHFSLQEIKSATKGFDESLVIGVGGFGKVYRGVVDGDTKVAIKRSNPSSEQGVLEFQTEIEMLSKLRHKHLVSLIGCCEDNGEMILVYDYMGHGTLREHLYKSGKPPLLWRQRLEILIGAARGLHYLHTGAKYTIIHRDVKTTNILVDDKWVAKVSDFGLSKTGPTVQNQTHVSTMVKGSFGYLDPEYFRRQKLTEKSDVYSFGVVLFEVLCARPALNPSLPREQVSLADHALSCQRRGTLEEIIDPVLEGKVAPDCLKKFAETAEKCLSDQGVDRPSMGDVLWNLEFALQMQDTFDNGGKPPEVDDYSSSFTITPPSMEESLAANAAALSLISEDMDEEDIANSVVFSQLTHPTGR

SEQ ID NO: 243 - DNA, 4505 bp, Hordeum vulgare
  source 1..4505: mol_type = unassigned DNA
tattgttgaactatttgttgtatttcatgatactatttgtttgagttgtaataataaattgaactatttattttaaacttggttgaatgatgtttgtgatttaaattatatgtcatgtctaatgtctttgttttgtgaacgtgtaaaatttattgtgttcaaattacaacaaacgtaaggcgccggagtgatagcaaggacttgaaaaggaaaggttttttacgactaagatgtttcagttcgccccggctcgcgcccgcactgcatttcaacgcggttgctgcggccagcgcaaccacgccaaacttgactatcgcgagtcgcaaaccaaattctagcgcgtggcacgcgcgtgttggagatgccgtaagtagagccaacattcagcaagaatcaacgaccgaacaggagatgaactcaaccaaatttaaaattcagacttggatatgactaaagtgttacttttgttgtgttgaaaaggggcatcctgtgttgcatggcatggtatggtctaaaacaggacctaagcatgcggtgagccatagatgatgcatgggttgcaagtgccaaattaagtgaaaccaggcgcacgacatggcatggcatggcatgcagccgttgctgccaaaacgctcctgcctgcatctgcatctgcatgcatgcatgcacgtcgtccgtccgtcctcaacgcccgtacgtcgttgctccatccttccctccggccggcctagctagcttccattcgatttctcttttccccttcccttcacttccctggaactccaggagcaggaggagaacgcatcatctgttcttctccctcctcaacatccatccatccatccatccatcttttaaatcaatcaaatctaacaacacccattgccggccggccgtgcagtgatcgtccatcatggcggccgcccgtggccgaggcgtcctgctcgccgtcctcttggcggtggcgttggcgttggtgtcggtcggcgccgacatatacaagccgacggactccattctggtcgactgcgggtcggacaaggaagggcaggacgaggacggccgcaagtggaccagcgacaaggacagcaagtttctccccgacggtggcaagtcgtccatcacggccaccgccgacatcaatgacccgtcgctcccctcctccgtgccctacatgacggcgcgcgtcttccccaaggagaccgcctacacgttccccgtctccgacgccgaccggcactgggtgcgcctccacttctacccggcgtcgtaccacgacatccccgccgaccacttcttcttctccgtcaccacctccaccggcgtgacgctgctccgcaacttcagcgtctacgtcaccgccaaggccctcacacaggggtacatcgtccgggagttctccctccctccctccaccaccggctcgctgtcgctcaagttcacgcccaccgccatgaacaacgcctcctacgccttcgtcaacggcatagagatcctgtccatgcccaacatcttcgccgacccggcccagctggtgggcctgggcgaccagaccctggacgccagcgccggcaacatgcagaccatgtaccggctcaccgccggcggctcctacatcccggccaccaaggactcggggctgtcccgcgagtggttccccgacacaccctacatctacggcgccgccacgggggtcacctacgaggccaacgacacggtccccatcaagtaccccagccccgccgccgagtacctggcgccgcagagcgtctacgacaccagccgccacatgggccgcgacggcaacgtcaacagggtcaacaacctcacctgggccttcgaggtggacggcaacttcacctacctcgttcgcctccacttctgctcgctcatggaggacaagatcaaccaggtcgtcttcagcatcttggtcaacaacaagacggccaccaccaccggcagcgccgacatcatcgcctgggccaaggagaagaaccctgacagccccgggaaaggggtgccggtcatcagggactacgccgtgttcacggccgccgctccggccggcgccgacagcgtcctgtgggtgacgctgcgccccgacctcaccaccaccccgcagttcgtcaacgctttcctcaacggcctggaggtgttcaagacgagcgacgcctccagcaacctggccggcccgaacccggacatctccaagatgctggcggaggcggaggcggaggccgatgacgtggaaggggagttcagggagagggcgagcaacgtgggcgcgctgatcggcggggcagcgggcggcgctgcggcgttcgggctggtggcgggcttgtgcttcgtggcgtaccagagcaagaagaggaaggagctgagcaacagccggtcgcactcgtcgtccgggtggctgccggtgtacggcggcggagggaactcgcagacgagcgtgagcaagtcgtcgggcggcaggagcgcggtgacgctgaaccccaacatcacagccatgtgccggcacttctcgctccaggagataaagtcggcgaccaaggggttcgacgagtcgctggtgatcggcgtgggcgggttcgggaaggtgtaccgcggggtggtggacggggacaccaaggtggccatcaagcgtagcaacccgtcgtcggagcaaggggtgctggagttccagacggagatcgagatgctgtccaagctgcggcacaagcacctggtgtccctcatcggctgctgcgaggacaacggcgagatgatcctcgtctacgactacatggggcacggcacgctgcgggagcacctctacaagagcggcaagccgccgctgttgtggaggcagaggctggagatcctcatcggcgccgcacgggggctacactacctgcacaccggcgccaagtacaccatcatccaccgcgacgtcaagaccaccaacatcctcgtcgacgacaaatgggtggccaaggtctccgacttcggcctctccaagacggggccgacggtgcagaaccagacgcacgtcagcaccatggtgaagggcagcttcgggtacctggacccggagtacttccgccggcagaagctgacggagaagtcggacgtctactccttcggggtggtgctgttcgaggtgctgtgcgcgcggccggcgctcaacccgagcctgccgcgggagcaggtcagcctggcggaccacgcgctcagctgccagcgcaggggcacgctggaggagatcatcgacccggtgctggaagggaaggtggcgcccgactgcctcaagaagttcgccgagacggcagagaagtgcctgtcggaccagggcgtcgaccgcccctccatgggcgacgtgctctggaacctcgagttcgcgctgcagatgcaggacacattcgacaacggaggcaagccgcccgaggtcgacgactacagcagcagcttcacaatcacaccgccgtccatggaggagagcctcgccgccaacgccgccgcgctgtcgctcatcagcgaggacatggacgaggaggacatcgccaacagcgtcgtcttctcacagctcacgcacccaaccggacgatgatcccttagctagcctgccgcctcgatccagcttcacttcactacacttgacttgatgatgatgatgatgatggacggacgtctcgatcgtgtaattaaggtgtaacagatcagatcgaatgtgttgtacgtaccacgagcagacacaagacatgcgtgcatgcagaagtaaaaaggcccgtacgtccatcgatcgatcggccggggtgggtgcatcggagactgtgttgtacgtaccagctgtgctatctatactgtatgtatgttccaaaattagtgtaaaacaaaacttgtaatacaaactcgagtgttcttcgactctggtgtggtgtggccaacggacgggggtgtgtgatggatgtaaatgaaaatgggatgaaccagttaaaaagcgaccaccaggtgataatattcaagaccaccgacagtcaatcgtctgtgtgggaataggagatgtcggtcgtcctcctctcctggcgcggcgattctcgccgccggcgccaccgtctgagcgggcagagacaaccgagcacgtgctcatctccgtgcgtggcagccatgtaccgccacggtcccttgacccaggggtgctcggacccaaacctgtgtcgcacaccgtggtcgagccgcttgggggccccgatgctacagggagagagagccttatctactcataccgtcccccaccaccaaccccgcaccacccgctgccactttcacttccgatctcgatctcgattccctcttcagccacttctagagctctcctagggtttccgctcctagggtttcttctaccttcgcctggtgggaaggaaaagtgggaggggatcagcgatccttcgctcaggtggctgcttcgcctccgcggccgcagtccatggcgggacgtgacggaggtaatcggttcaaccgtg

SEQ ID NO: 244 - DNA, 2535 bp, Hordeum vulgare
  source 1..2535: mol_type = unassigned DNA
atggtgcgccgcggggcgctcccgctggcgctgctggccgcgctagcgacgctgacggccgtgtcggggcaagggaagccggtgacggacaacggtgccggctcgtcgcaggccaagttcacgcccaaggacgccttctacatcgactgcggcggcacggctgccgccgacaccaaggacggcaagtccttcaagaccgacgcggaggccaacaacctgctctccgccaaggacgccatcaaggtcgccgacgacaaggcagacgtgccgtcgcacctctaccgcaccgcgcgggtcttcaaggcggaggccatctacaacttcccgctcacggcccccggctggcacttcatccggctctacttcttccccatcaagagcggcgaggccgacctcgcggcggccacgttcgacgtcaccaccgctgctaacgtccttctccacagcttcaccgccgaggccaaggcggtcatgaaggagtacgtcatcaacgccaccgagaacaagctcgagctcaagttcaccccggcgtcggggtcggcggccttcatcaacgcaatcgaggtcgtcaacgcccccgaccagctcctcaacgacaaggccctgacggtgtcgccgctcgccgagataagcgggctgtcggaggccgcataccaggtggtttgtcggctcaacgtcggcggcccggtcatcggccccgtgaatgacacgctcggccggcagtgggacgaggacgggccgtacctgaaccccaaggaggccggggtggaggtgtcggtgtcgccgaacgtgatcaagtaccccgagacgtacccggtgtccaagctcgtggcgcccacggcggtgtacaccaccgcccgccacatggccaactccggcgtggcgaaccagaacttcaacgtgtcgtggaaagtggacgtggacgcctccttcgactacctcgtccgtctcttcttcgccgacatcatcagcgacaccatgaacgacctctacttcaacgtgtacatcaacgagcgcaaggccatctccggcctggacctttccaccatcactggcgacatggccgcgcccttctacaaagacttcgtggtgaactcgtcggtcgacaccgacgggcacattatcttcgcggtggggccgatggggcaggacacgggccgcatcgacgcgctgctcaacggcgcggaggtgctgaggataagcaactcggtgggcagcctggacggcgagttcggcgtggacgggcggatggtggacgacggcagcggcacccgcaaggtggtggcggccgtggggttcgcaatgatgttcggcgcgttcgccgggctggggtgcatggtggtgaagtggcaccggcggccgcaggactgggagcggcgcaacagcttctcgtcctggctgctgcccatccacacggggcagtccttcaccaacggcaaggggtccaagagcggctacaccgtctcctccaccgcagggctgggccacttcttctccttcgcggagatgcaggaggcgaccaagaacttcgacgacagcgccatcatcggcgtgggagggttcggcaacgtgtacgtgggggagatcaacgaccccgacgaggaagggtccaggatcaaggtggccatcaagcgcgggaacccgtcgtcggagcagggcatcaacgagttcaacacggagatccagatgctgtccaagctccggcaccgacacctggtgtccctcatcggctactgcgacgagaacgaggagatgatcctcgtctacgagttcatgcagcacgggccgttccgcgaccacatctacggcggccccgagggcctgcccacgctctcctggaagcagcgcctcgagatctgcatcggcgccgccaggggcctccactacctgcacaccggcacggcgcacgggatcatccaccgggacgtcaagaccaccaacatcctcctggacgaaaagttcgtcgccaaggtggccgacttcggcctctccaaggacgggccagggatgaaccagctgcacgtcagcaccgccgtgaagggcagcttcgggtacctggacccggagtacttccggtgccagcagctgacggacaagtcggacgtctactccttcggggtggtgctcctcgagacgctgtgcgcgcgggcgcccatcgacccgcagctgccgcgcgagcaggtcagcctcgccgagtggggcatgcagtggaagcgcaagggcctcatcgagaagatcatggaccccaacctcgccggcaaggtcaacccggagtcgctcgccaagttcgccgagacagccgagaagtgcctctgcgagttcggcagcgaccgactctccatgggcgacgtgctctggaacctcgagtacgcgctgcagctgcaggaggccaacccgcccgagggcgccaccgacgccgacgacgcagacgcctccatcgtctcctcctccagcggcgtcagcaccgtgcccgacgcgtccaccacctccgccaacgagctcttcgcgcagctcgcagacatgaaggggaggtga

SEQ ID NO: 245 - protein, 844 aa, Hordeum vulgare
MVRRGALPLALLAALATLTAVSGQGKPVTDNGAGSSQAKFTPKDAFYIDCGGTAAADTKDGKSFKTDAEANNLLSAKDAIKVADDKADVPSHLYRTARVFKAEAIYNFPLTAPGWHFIRLYFFPIKSGEADLAAATFDVTTAANVLLHSFTAEAKAVMKEYVINATENKLELKFTPASGSAAFINAIEVVNAPDQLLNDKALTVSPLAEISGLSEAAYQVVCRLNVGGPVIGPVNDTLGRQWDEDGPYLNPKEAGVEVSVSPNVIKYPETYPVSKLVAPTAVYTTARHMANSGVANQNFNVSWKVDVDASFDYLVRLFFADIISDTMNDLYFNVYINERKAISGLDLSTITGDMAAPFYKDFVVNSSVDTDGHIIFAVGPMGQDTGRIDALLNGAEVLRISNSVGSLDGEFGVDGRMVDDGSGTRKVVAAVGFAMMFGAFAGLGCMVVKWHRRPQDWERRNSFSSWLLPIHTGQSFTNGKGSKSGYTVSSTAGLGHFFSFAEMQEATKNFDDSAIIGVGGFGNVYVGEINDPDEEGSRIKVAIKRGNPSSEQGINEFNTEIQMLSKLRHRHLVSLIGYCDENEEMILVYEFMQHGPFRDHIYGGPEGLPTLSWKQRLEICIGAARGLHYLHTGTAHGIIHRDVKTTNILLDEKFVAKVADFGLSKDGPGMNQLHVSTAVKGSFGYLDPEYFRCQQLTDKSDVYSFGVVLLETLCARAPIDPQLPREQVSLAEWGMQWKRKGLIEKIMDPNLAGKVNPESLAKFAETAEKCLCEFGSDRLSMGDVLWNLEYALQLQEANPPEGATDADDADASIVSSSSGVSTVPDASTTSANELFAQLADMKGR

SEQ ID NO: 246 - DNA, 3735 bp, Hordeum vulgare
  source 1..3735: mol_type = unassigned DNA
ttgatgaatttgcttgtttcacgatgtgtgtgatggaagataacctcaaaactagacccagtggctctagaagatctgcgacatcgatcgcatcttttatcttcctcttctcccattggcatgcaactagcacacgctccaatcttgcatggccaccgcaccgtggatcgatcgtcgaggcagcatgcagcaaccacgacaaggtccaagaataggcatgtcgagtcggtctcgtgcagcatgagttgcgtcaatggtggacgaacgagcccccaaacatagcgcgccaacggccgggttaaacttggcatggcgccacccaccaccgcttaacccccgcccatttctccctccccctcaagtctcctccgcccccttccctctcctccgattggccccgcccaaccagagagagggcgagagggcgccaccccagccaggccaggccaccacaataccaaaaacaattagcacggtgtcccgggcgtccggtgctgcgcgtcgaggtggcggcagcggcggcggcggccctgacgtgagcggcggaggcacaacagcagctcgccggcgaaggtgacgaggagcagcaccgcgcccaagatggtgcgccgcggggcgctcccgctggcgctgctggccgcgctagcgacgctgacggccgtgtcggggcaagggaagccggtgacggacaacggtgccggctcgtcgcaggccaagttcacgcccaaggacgccttctacatcgactgcggcggcacggctgccgccgacaccaaggacggcaagtccttcaagaccgacgcggaggccaacaacctgctctccgccaaggacgccatcaaggtcgccgacgacaaggcagacgtgccgtcgcacctctaccgcaccgcgcgggtcttcaaggcggaggccatctacaacttcccgctcacggcccccggctggcacttcatccggctctacttcttccccatcaagagcggcgaggccgacctcgcggcggccacgttcgacgtcaccaccgctgctaacgtccttctccacagcttcaccgccgaggccaaggcggtcatgaaggagtacgtcatcaacgccaccgagaacaagctcgagctcaagttcaccccggcgtcggggtcggcggccttcatcaacgcaatcgaggtcgtcaacgcccccgaccagctcctcaacgacaaggccctgacggtgtcgccgctcgccgagataagcgggctgtcggaggccgcataccaggtggtttgtcggctcaacgtcggcggcccggtcatcggccccgtgaatgacacgctcggccggcagtgggacgaggacgggccgtacctgaaccccaaggaggccggggtggaggtgtcggtgtcgccgaacgtgatcaagtaccccgagacgtacccggtgtccaagctcgtggcgcccacggcggtgtacaccaccgcccgccacatggccaactccggcgtggcgaaccagaacttcaacgtgtcgtggaaagtggacgtggacgcctccttcgactacctcgtccgtctcttcttcgccgacatcatcagcgacaccatgaacgacctctacttcaacgtgtacatcaacgagcgcaaggccatctccggcctggacctttccaccatcactggcgacatggccgcgcccttctacaaagacttcgtggtgaactcgtcggtcgacaccgacgggcacattatcttcgcggtggggccgatggggcaggacacgggccgcatcgacgcgctgctcaacggcgcggaggtgctgaggataagcaactcggtgggcagcctggacggcgagttcggcgtggacgggcggatggtggacgacggcagcggcacccgcaaggtggtggcggccgtggggttcgcaatgatgttcggcgcgttcgccgggctggggtgcatggtggtgaagtggcaccggcggccgcaggactgggagcggcgcaacagcttctcgtcctggctgctgcccatccacacggggcagtccttcaccaacggcaaggggtccaagagcggctacaccgtctcctccaccgcagggctgggccacttcttctccttcgcggagatgcaggaggcgaccaagaacttcgacgacagcgccatcatcggcgtgggagggttcggcaacgtgtacgtgggggagatcaacgaccccgacgaggaagggtccaggatcaaggtggccatcaagcgcgggaacccgtcgtcggagcagggcatcaacgagttcaacacggagatccagatgctgtccaagctccggcaccgacacctggtgtccctcatcggctactgcgacgagaacgaggagatgatcctcgtctacgagttcatgcagcacgggccgttccgcgaccacatctacggcggccccgagggcctgcccacgctctcctggaagcagcgcctcgagatctgcatcggcgccgccaggggcctccactacctgcacaccggcacggcgcacgggatcatccaccgggacgtcaagaccaccaacatcctcctggacgaaaagttcgtcgccaaggtggccgacttcggcctctccaaggacgggccagggatgaaccagctgcacgtcagcaccgccgtgaagggcagcttcgggtacctggacccggagtacttccggtgccagcagctgacggacaagtcggacgtctactccttcggggtggtgctcctcgagacgctgtgcgcgcgggcgcccatcgacccgcagctgccgcgcgagcaggtcagcctcgccgagtggggcatgcagtggaagcgcaagggcctcatcgagaagatcatggaccccaacctcgccggcaaggtcaacccggagtcgctcgccaagttcgccgagacagccgagaagtgcctctgcgagttcggcagcgaccgactctccatgggcgacgtgctctggaacctcgagtacgcgctgcagctgcaggaggccaacccgcccgagggcgccaccgacgccgacgacgcagacgcctccatcgtctcctcctccagcggcgtcagcaccgtgcccgacgcgtccaccacctccgccaacgagctcttcgcgcagctcgcagacatgaaggggaggtgatccatccgacttgtgaaatctgaatcgatcacatccagccatgcatgcgtcgccgtcagcagcaccgccccctagctagctagctagttcatcaatcccggcgcgcgccttctgcatgcatgtccatcgtccatggtggaacggaagccaaggaaggatccgattaacactcaaattaaaccaaccgaggtccatccatccaagagtatatatgtgtgtaaaaaatgtatgtgtgtgtctcaatcgcgtttactgatgcagaaaattccaaaatgtataccgcaaatgtatgtaaaatcatggtgtcaattaaactttgtctcacaaaaagtgtaaaatttgttagcattcagctggagctcatttctctttctccagcaaaagaaaagagagctcatttctcttacccccatcgatccacaataatgcagttttaaactgaactggagttagttcaaaaattgccacacttattatggatgagaggtagtaattaatattgatggggccaataggatttccatcgagttaccacatagtataatggaatttgatcggttttgctaaacaaatccaaaatttcaggcacatttccctctt

SEQ ID NO: 247 - DNA, 5856 bp, Hordeum vulgare
  source 1..5856: mol_type = unassigned DNA
atgacgacgccgcgcggtggcgaggatgtgccatcgtcgacggcgtcggccgccgccgccgccgcttcgacgaccgagcccaacacgccgacgtcggcgcacacgtcggggctcaaccggcgggggtcgaggagcgccgccatggccgccttctccatggaggtcttcgacaacgaggtggtgccgtcctcgctcagcagcatcgccccgatcctgcgcgtcgccgccgagatcgagcccgagcgcccccgcgtcgcctacctctgtcggttctacgccttcgagaaggcgcacaggctggatcaaaactccgttggtcgtggcgtccggcagttcaaaacgtccctgcttcaacgcttagagaaggacaatagcccgagtctcgcaaagcgattgaagaaagccgatgcccgcgaaattgagagtttttatcaagaatactatgagaactatgtccgcaccctcgacaaaggggaacaagccgacaggactcaacttgggaaggcctaccagacggctggagtcctcttcgaggtgctctgcgccgtcaacaagaatgagaaggttgaggaagttaaccccgagattatgcgctggcacactgaggtgcaagaaaagaaagacatctatgcgccgttcaatattctgcctctcgatgcggccagtgcatcccagtccatcatgcagctagaggagataaaagcagcagtcgcagctctgcggtacacacggggtttgacctggccttctgcatttgagccggaaaggcagaaggggggtgagctcgatttgctcgattggttgagagctatgtttggctttcagcgggacagtgtcaggaatcaacgggagcatttgattcttctcctcgctaatgtgcacattagacttgagccaaagcctgaaccacttagcaagctggatgaccgagctgttgatgtagtgatgaacaagttgttcaacaactacaagaagtggtgcaaatttttatcacggaaacatagtctgagaaatcctccgggtgctcaattacaggaagttcagcaacgcagaattttgtacctaggtctttatcttcttatctggggcgaatcagcaaatatccggtttatgccagagtgtctttgctacatttttcacaatatggcatatgagttgcatgggttgcttgctggaaatgttagtattgtgactggtgaaaatatcaggccatcttatggtggcgatgaggaggctttcttaaagaaagtggtcacacctatctatcgtgtcatcaaaaaggaggcaggaaaaagtcaacatggaaaaacagcacattcagcatggtgtaattatgatgatctaaatgagtacttctggacacctgattgtttctcactgggatggccaatgcgagatgatggcgacttcttcaaatccgtgcacgattcaaggcctgtagctgtggctggaagctcctcaccaaagggttctagtaaaagcacagggaagacaaattttgtagagactagatcgttttggcacatctttcgtagttttgaccgaatgtggaccttctatctgttggctctacaggcaatgttgatttttgcttggagtgaatatacagtgactcaaatccttcggaaggacctcttatattctctatcaagcatatttgtcacagcagcatttttacagttcctccaaagtattttagactttattctgaactttcctggccacattagatgcaagttcattgacgtcgtgagaaatattctgaagatagtagttagtgccgcgtgggctgtgattcttcccgttttctacatcagcagtcaaacaaaagtcaatttaccactgaaaaatctggacagatggtttggttatgtgaaaggagtgccacaactatatatcctggctgtggcggtgtacctgatacctaatatcattagtgcaacgctcttcctgtttccgatgttccgaaggtggatagagaactcggattggcatattgttagactgctactgtggtggtctcagaaacgaatttatgttggccgtggaatgcatgaaagtcaagctgttcttctgaagtacacattattttggattttgctgctatgctccaagctttccttcagttactttgtccagatacaacctcttataaggcctaccaaggatataatgagtgttcataacattcgttatgagtggcatgagttttttccaaacgcatcttataatatcgctgctatcctatccctctgggcccctgttctgttggtctacttgatggatacacagatatggtacgccattttctctacaatatccggcggtatgtctggggcacttggacgacttggggagattcgaacactaggaatgctgagatcacgatttcactctttgcctggagccttcaatacatatttggtgccatcagacaaaggcagaaacagacgttttacactctcaaagcgctttgcagaggtttcccccaacaagagaactgaagctgccaagtttgctcaactgtggaatgaagtgatttgcagtttccgcgacgaagattttataagtgataaggagatggacctactggtggttccatactcgtcagacccgagcctaaaattgatgcagtggccgttgttcttgcttgccagcaagatacctatagctttagacatggcagcacaatttagaccgagagacagtgatttgtggaagcgtatatgtgcagacgagtatatgaagtgcgctgtaattgaatgctacgagtcattcaaacttgttcttaatttagtggtggttggagaaaatgaaaaaaggattattggcattataatcaaagagattgaagctaacatctcaaagaatacattccttgccaattttaggatgagcacattgccagtcctttgcaagaagtttgtggagcttgtatccaccttgaaagaaagagacgcctcaaaatttgataatgtagtgctgttgcttcaagacatgctggaagtgatcacgagggatatgatggtcaatgagatcaaagaactagctgaatttggtcatgggaacaaggatttagttccaagaagacaactttttgcgggcacaggcacaaaacctgcaattgttttcccaccaccaatttctgcgcagtgggaagaacaaattaagcgcttgtaccttcttttaactgttaaagaatcggcaatggatgtgcctacaaatcttgaagcccgccggagaatatcatttttcactaattcgctattcatggaaatgccacgtgcacctagagtgcgcaaaatgctctctttcagtgtaatgacaccatactacagtgaggaaactgtatattcaagaaacgaccttgatctggagaatgaggatggtgtatcaattatattctacctgcagaagatctttccagatgaatggaataatttcatggaaaggattagttgcaaaagagaagctgaagtctggggaaatgaagaaaatgttcttcaacttcgtcactgggcctctctaagagggcagacactctgtcgaacagtgagaggcatgatgtattataggaaagctttgaagcttcaagcattcctagacatggcttctgaatctgagatactagaaggctataaagccattgcagatcccgcagaggaagagaagaaaagccaaagatctctgtcttctcaacttgaagctatagcagatatgaaattcacatatgttgctacgtgccagatctatggaaatcagaaacagtcgggtgatcgacatgcaacagatattctgaacttgatggtgcattatcctggtctccgcgtggcatacattgatgaagttgaggagagggatggtgagaaggtgcaaaaggtcttctactcggtgctagtaaaagctcttgacaatcacgatcaggaaatataccgcataaaattgccagggacagcgaaattaggtgaagggaaacctgaaaaccaaaatcacgcgatcatttttacgcgcggagaagctttacagaccattgatatgaaccaggacaattatttggaggaagctttaaaaatgcggaatttgctggaagaattcaatgagaatcatggtattcgtcctccaacaattcttggagtacgtgaacacatattcaccggaagtgtcgtgtcatctcttgcctggtttatgtcaaaccaggaaaccagctttgtgacaataggacagagggttcttgccaatccattgaaagtacgttttcactatggacatcctgatgtgtttgataggatttttcacattacaagaggtggaattagcaaggcttcctgtggtataaacttgagtgaagacatttttgctggtttcaactcaactctgaggcgaggaaatgtcacccatcacgagtacattcaagttggaaaaggacgggatgttgggttgaatcaaatttcactctttgaggccaaagtggcatgtggcaatggagagcaagtgcttagcagagatatctaccgtttgggccaccgctttgacttcttccgaatgctctcatgttacttcacaactgtgggattttatgtcagctcaatgatggttgtcataatagtatatgttttcctgtatggaaggctttatttagccctaagtggacttgagtttgcaattatgaagcaagcacgaatgagaggtaatcgtgctcttcaggcagccatggggtcccaatctattgtgcagctaggtcttttgatggccttacccatgtttatggagatcggactggaaaggggttttagaagcgccctgggggatttcatcatcatgcagctacagctatgtgcagtattctttaccttttccctcgggacaaaatcacattattttggccgcacaatcctccacggcggtgcaaaatatagagcaactggcagaggctttgttgttcgccatgtgaagtttgctgaaaattatagaatgtatagcaggagtcattttgtgaaaggacttgagctcatgttactacttgtagtgtatgagctctatggtgatgtggctacagattccactgcctatgttctgctgacatcatctatgtggttcttggtaatcacatggctgtttgctccattcctcttcaacccatcaggatttgaatggcaaaaggtggtcgatgattgggatgattggaacaaatggataagcagccgtggcgggattggtgtgccggccaataaggcctgggagtcgtggtgggaagaggagcaggaacatctgctgtctacaggcatagtcggccgcatatgggaaatcatattatctttccgattcttcatgtttcagtatggtatcatgtaccatttgaatatcgctgatggcaacaaaagcatatcagtttatggtctgtcttggctggtcattgtagcagtagtgttggtcctcaaggtggtgtctatgggaaaaaagaaatttagtgccgacttccagcttatgttccggctcctcaaattgttcttgttcattggatctgttggaactttggcgattcttttcacccttctgcaccttacagttggtgacatattcgccagcttccttgcctttgcacccacaggatgggccatcctgcagatatcacaggcaagcaagccagtggtgaaggctttaggactgtggggatctgtgaaggccttatccagggggtacgagtaccttatggggatcgtgatcttcgtgccagtggcggttctggcatggttccctttcgtctccgagttccagacgaggttgttattcaaccaggcattctcccgaggcctccaaatctctcgcattttggctggtgggaagaagcaaaactga

SEQ ID NO: 248 - protein, 1951 aa, Hordeum vulgare
MTTPRGGEDVPSSTASAAAAAASTTEPNTPTSAHTSGLNRRGSRSAAMAAFSMEVFDNEVVPSSLSSIAPILRVAAEIEPERPRVAYLCRFYAFEKAHRLDQNSVGRGVRQFKTSLLQRLEKDNSPSLAKRLKKADAREIESFYQEYYENYVRTLDKGEQADRTQLGKAYQTAGVLFEVLCAVNKNEKVEEVNPEIMRWHTEVQEKKDIYAPFNILPLDAASASQSIMQLEEIKAAVAALRYTRGLTWPSAFEPERQKGGELDLLDWLRAMFGFQRDSVRNQREHLILLLANVHIRLEPKPEPLSKLDDRAVDVVMNKLFNNYKKWCKFLSRKHSLRNPPGAQLQEVQQRRILYLGLYLLIWGESANIRFMPECLCYIFHNMAYELHGLLAGNVSIVTGENIRPSYGGDEEAFLKKVVTPIYRVIKKEAGKSQHGKTAHSAWCNYDDLNEYFWTPDCFSLGWPMRDDGDFFKSVHDSRPVAVAGSSSPKGSSKSTGKTNFVETRSFWHIFRSFDRMWTFYLLALQAMLIFAWSEYTVTQILRKDLLYSLSSIFVTAAFLQFLQSILDFILNFPGHIRCKFIDVVRNILKIVVSAAWAVILPVFYISSQTKVNLPLKNLDRWFGYVKGVPQLYILAVAVYLIPNIISATLFLFPMFRRWIENSDWHIVRLLLWWSQKRIYVGRGMHESQAVLLKYTLFWILLLCSKLSFSYFVQIQPLIRPTKDIMSVHNIRYEWHEFFPNASYNIAAILSLWAPVLLVYLMDTQIWYAIFSTISGGMSGALGRLGEIRTLGMLRSRFHSLPGAFNTYLVPSDKGRNRRFTLSKRFAEVSPNKRTEAAKFAQLWNEVICSFRDEDFISDKEMDLLVVPYSSDPSLKLMQWPLFLLASKIPIALDMAAQFRPRDSDLWKRICADEYMKCAVIECYESFKLVLNLVVVGENEKRIIGIIIKEIEANISKNTFLANFRMSTLPVLCKKFVELVSTLKERDASKFDNVVLLLQDMLEVITRDMMVNEIKELAEFGHGNKDLVPRRQLFAGTGTKPAIVFPPPISAQWEEQIKRLYLLLTVKESAMDVPTNLEARRRISFFTNSLFMEMPRAPRVRKMLSFSVMTPYYSEETVYSRNDLDLENEDGVSIIFYLQKIFPDEWNNFMERISCKREAEVWGNEENVLQLRHWASLRGQTLCRTVRGMMYYRKALKLQAFLDMASESEILEGYKAIADPAEEEKKSQRSLSSQLEAIADMKFTYVATCQIYGNQKQSGDRHATDILNLMVHYPGLRVAYIDEVEERDGEKVQKVFYSVLVKALDNHDQEIYRIKLPGTAKLGEGKPENQNHAIIFTRGEALQTIDMNQDNYLEEALKMRNLLEEFNENHGIRPPTILGVREHIFTGSVVSSLAWFMSNQETSFVTIGQRVLANPLKVRFHYGHPDVFDRIFHITRGGISKASCGINLSEDIFAGFNSTLRRGNVTHHEYIQVGKGRDVGLNQISLFEAKVACGNGEQVLSRDIYRLGHRFDFFRMLSCYFTTVGFYVSSMMVVIIVYVFLYGRLYLALSGLEFAIMKQARMRGNRALQAAMGSQSIVQLGLLMALPMFMEIGLERGFRSALGDFIIMQLQLCAVFFTFSLGTKSHYFGRTILHGGAKYRATGRGFVVRHVKFAENYRMYSRSHFVKGLELMLLLVVYELYGDVATDSTAYVLLTSSMWFLVITWLFAPFLFNPSGFEWQKVVDDWDDWNKWISSRGGIGVPANKAWESWWEEEQEHLLSTGIVGRIWEIILSFRFFMFQYGIMYHLNIADGNKSISVYGLSWLVIVAVVLVLKVVSMGKKKFSADFQLMFRLLKLFLFIGSVGTLAILFTLLHLTVGDIFASFLAFAPTGWAILQISQASKPVVKALGLWGSVKALSRGYEYLMGIVIFVPVAVLAWFPFVSEFQTRLLFNQAFSRGLQISRILAGGKKQN

SEQ ID NO: 249 - DNA, 18580 bp, Hordeum vulgare
  source 1..18580: mol_type = unassigned DNA
gtggaggctgtaattctttctgcacacaaatacgttttttacctacccgtgctgaaagcaatgggtcatacatgtcagtctaactttgactgtcgcgtgagacggctgcacggtgataaaagagcaggtttgtggtccaacggcccgccactacgctcggcccaccggccagagagagaaacgcgtccccgggaggccggggcagaggtagcttcagcatttccgccgcctcaacccctccgatcgcgccagcgtgtcccccctcgccctagggaagggaggctgggccgtcggatccgggtataagtagcgacgcgcacgcgagccgtgcctattcctgtacttgcctccccgaccacctcccccgtttggttccgccattccattccagcgcaggacggcgggacgcgcgaggcggaggcggaggcggaggcggaagggaagcggagcgcgctcgcggccgctcgcgctagggttcgtccgcgccctctccccccctctctatcccgtccgaatcgaccggccctggctagctggcgctgacccgctgccccgaatgcaggcggaagcccccgagatcgcgaggtggtggaggcggagatgacgacgccgcgcggtggcgaggatgtgccatcgtcgacggcgtcggccgccgccgccgccgcttcgacgaccgagcccaacacgccgacgtcggcgcacacgtcggggctcaaccggcgggggtcgaggagcgccgccatggccgccttctccatggaggtcttcgacaacgaggtggtgccgtcctcgctcagcagcatcgccccgatcctgcgcgtcgccgccgagatcgagcccgagcgcccccgcgtcgcctacctctgtaagttcgtcgcactcccaagccgtccgcgcgcgtgccgcctattttgggagattttcgacgccttttcctggcacccagcttggcgcatttcgtgcctcggccggacgaaacgggcaactcgtggtgatatgtttggcgactgataaatgtcccactgcccacagccgttgtagcgtttatttgggaggttttgtgctcaggaatctcgaaaaatctatgccgcgtgcgtcggtggttgtttttttgttcctgggctgctttgattggtacgagtttaaggggcatgtctgagatttctccgcgtatgttggttttgctgcgttagctggatcttcggctttgatatgtttgtccatggtagtcgtgaagtagctagcttctctcatgtatgcaccttgaggtgttcgtatatgatcgtatcagatattcagatgagatggcttgtgtttaaggggcatgtctgagtctctgagatttgtctgcgtatgttggttttgctgcgttagctggatcttcggctttgatatgtttctccttactcgtgaagctgatcctagaagtagctagcttctcctgctgtatgcaccatggggtgttcgtatatgatcgtatcagatgaggttcagttggtgcagtttacagttgtgttgcttttgctcgaatgttcgaatcatttagggtagatagctctgctcgatcgaccggtttgcttggaaagttggaataccatatatcaggtagctcgtgttgattcttcggtttctctatgtgagatttctcctcctatgtcgacctacctgtacatgctgtgctagattttggattttgtgtatgtttctcctattttcagtagctaattttgtggcaggttttcttctgtatgcttgcattattcgtaccaaaccaaattactcctgttttttggagtgcagagctgcagatttgattcattcgatggcttttccgacagttctccctcgttttgattgactatgagcgctctgtgtgttgtttgaatcatgtcagatatgacagttttgctccaccagcttttttccgaagaagtgcatatcacgtagtacgaatgggtgcttctggttcaccctttttcgggatctcacgttgatctgttactctgcgaactaggtcggttctacgccttcgagaaggcgcacaggctggatcaaaactccgttggtcgtggcgtccggcagttcaaaacgtccctgcttcaacgcttagagaaggtgtgagacgtctttctctgtctcttcccctccataatttctgcatgatctagctgacttggcgtacatgagggtttgttttgttagttgatacatgtcgatttggtcatgttccctcgctggttttgactgggtgactgtatctggccttcatagatatattatgcaagttcccctaaaaaggatatgctagttgttgaattattattactactatcttagcttttaaactgcttgcaggatatataggtaatatatgagtttgtttggctaataagcctcatggagttaaaaccaagctggaagctaatatggacgacactaccttaatttagttgtcaatgtagtagtggtccgggttatgttgtccaaatgcctacagtatgcaacatgcatgcagtgtaagccatgaaagtatttcctacttttcatttttgtgttgtaatatacatcttgcagatacacgatttttaacttgaagagtatggccgttggactttagttcagtacacatttgtttcatgataagcttaccaactccatttccaaatacatgacgtagaaagcatgtggtcaaactttacctttgaccattagtcaaatcaaattatttagtttttctttgatagaaattgtagcattaggtttgtaattcagaacagtttcactgtatatactttttaattatatatgttgtgcactgaagactcaaaatgcaaaacattatctatcttagaatggtgggagtatatttgattattagtgataagttgataactgtcgatagtcaatctggaaattttattgtgatcatcttaatttgatgaccatattgggagttgtgatcagctaatcaaacctgcaagctcatttaatcctacctaacagataaagaacactgttctattaatagaatagtgtgcttccctttattgtgattatcttaatttttaaccacattgggagttgtgatcagccaagcaaacctacaagctcacttgatcctacctgattaggtaaacaacattgtgccagtaatagaatgttgtgcttcgttctacttatttcgtttcaaagtcacaactaaaccttcagttcagattcaacatttgtttcgtgtttctgctggggagggcgatgaggtaaactgatttcagataacaccatcctcctcatgattcgtctcaattgatcagtttgcaatggcagattcttgtttgttagagatatactgaggtagccacattctcatctgagcttattttttcagatgatccagttcaaatttagtactttgttgtttcctacttgaaaagttgaaatggccagcaaatgtagtaggaatgaggaaaaggagcagggacttagggttcccttgtttttttaaatcagattttgcctaacctactcttgaatccaaagatcctaccttaaattttcccatttcgctcctatgcaatccaacaggacaatagcccgagtctcgcaaagcgattgaagaaagccgatgcccgcgaaattgagagtttttatcaagaatactatgagaactatgtccgcaccctcgacaaaggggaacaagccgacaggtaattcccagtccctaacctgtgctgcgatctcctctataagcccaatccctcgctatcatgaatccggccccatgacattgtcgcctccaggactcaacttgggaaggcctaccagacggctggagtcctcttcgaggtgctctgcgccgtcaacaagaatgagaaggttgaggaagttaaccccgaggtttgtgctcactccagccaactgcagtcattctttctcagcagaaatctaggttccctctaatgcatcgagtttctccaaatttcctctgcagattatgcgctggcacactgaggtgcaagaaaagaaagacatctatgcgccgttcaatattctgcctctcgatgcggccagtgcatcccagtccatcatgcagctagaggaggtatacgactcacaacaatgcagcctgtttcctgaaaaaaggaacaattgcatcatgtactggttcaatgaaataaactgacgtggtcatcgaatgcatcattaatagataaaagcagcagtcgcagctctgcggtacacacggggtttgacctggccttctgcatttgagccggaaaggcagaaggggggtgagctcgatttgctcgattggttgagagctatgtttggctttcaggtctgctaccaactccaggcgaaccaatttcgattggcccattgtattactataagctaacactagtttatcttcttgtgtgcagcgggacagtgtcaggaatcaacgggagcatttgattcttctcctcgctaatgtgcacattagacttgagccaaagcctgaaccacttagcaaggcacactcctctaccgatatttactttcacagcttgacttcaggaatatcaatgtgataagcataagatcagttggttttgcatggataaagtgtggtggtgacagaacaggatatttgtctgaatttataatattttagaaaaaataaagttatttttcattggattagtaaccaattatttaccttcaacgttatgttgtgattgctggtgtaacttgccataacatacagatgcattttaatttctttcttgatactacttttgatttccatattcttgacattagaatttgctggactggtgccactactgcaaaaatgccagctgacttattggcattccaccacgaattcgattgattaaactttctgtatgcattattctgaagcaagtgtatagctaaataattttaattgcaccctccatttaccatgctttccttctctcctttttgttcatccttgcttgatgattgatctgatccattctttcacccctgaaacagctggatgaccgagctgttgatgtagtgatgaacaagttgttcaacaactacaagaagtggtgcaaatttttatcacggaaacatagtctgaggtatataattccttaattagtttcctatttatgtacattattgtgctgataatcttgcaactgcagaaatcctccgggtgctcaattacaggaagttcagcaacgcagaattttgtacctaggtctttatcttcttatctggggcgaatcagcaaatatccggtttatgccagagtgtctttgctacatttttcacaatgtaatttacacattcttattatcatatcaagtaccaaatctcatggcaaaaatatatctttgaatgagtcttctcaatgtgttcagatggcatatgagttgcatgggttgcttgctggaaatgttagtattgtgactggtgaaaatatcaggccatcttatggtggcgatgaggaggctttcttaaagaaagtggtcacacctatctatcgtgtcatcaaaaaggtactttgataaattaccattacctgaaattccaagttagtttgttctaaatatagttgtggtggtttttcaggaggcaggaaaaagtcaacatggaaaaacagcacattcagcatggtgtaattatgatgatctaaatgagtacttctggtctgtttacagccctattttctggtcacatgctgacagccttttcacactttctctgatagaccctactctgtttcaggacacctgattgtttctcactgggatggccaatgcgagatgatggcgacttcttcaaatccgtgcacgattcaaggcctgtagctgtggtacagttcgatatcagtctgtcagtatcccttccaaagactttgattaggaggagaatactgacaaataactatttataggctggaagctcctcaccaaagggttctagtaaaagcacagggaagacaaattttgtagagactagatcgttttggcacatctttcgtagttttgaccgaatgtggaccttctatctgttggctctacaggtactgtgccaaatttttcgattttgtttctctgtactatgatttttgatggtttgacactctgaatgtgaatcttataatttttaaaccgaacaggcaatgttgatttttgcttggagtgaatatacagtgactcaaatccttcggaaggacctcttatattctctatcaagcatatttgtcacagcagcatttttacagttcctccaaagtatgtttcccatttcaaatacttgtttcatatactaggcattttctgatgcatgtaatctttccttttattttttgagaacctgaaatttttagtatgacaactgataaatattggcataatttagttccctttatgtatgtactaccttctgcttttgtcaatggcattacgataagacattaggatctaccttccctttatgtatgtactgttaagctaggttcccgcgatacagagtaccttcacagcagaaagcaactggcaagaacattcatgtagatatctgcaactttaggatctcttctcatatgcattaaactagtgttactataccgagcagtcatgttcttgagatgctctccagtcttaaattcctgtggtcttgtgtgaggctgatattttctttaatttgatggcaggtattttagactttattctgaactttcctggccacattagatgcaagttcattgacgtcgtgagaaatattctgaagatagtagttagtgccgcgtgggctgtgattcttcccgttttctacatcagcagtcaaacaaaagtcaatttaccactgaaaaatctggacagatggtttggttatgtgaaaggagtgccacaactatatatcctggctgtggcggtgtacctgatacctaatatcattagtgcaacgctcttcctgtttccgatgttccgaaggtggatagagaactcggattggcatattgttagactgctactgtggtggtctcaggtattcaattcaatctattttatttatttatgttttattatatggaaaattacttatgcagcttatcctcgttgtaaatattcatttcaaaatttcttctatgaggcaatttttaataaggtaatactttgataagagggaactgtatttttaagaatgaatttgtcttgatatccttgccagcttgttgtttgtcatagtatcctagagggttgagaaactagtgataaaattgtaaactgtaacttgtaagaagagaaaataatccaatgacttctgatgcccgggcagagaattaccctaccattttttcattagtttgaaaaaaagcattgtatgattatcgaaaagttctacgatgcttgtgaaaattggtagttttcacttctctaacaatatgtgttcaactgaacgcatttgctatccaagtaatgaaaatgatattgcaagggtacagatggacaaaacagggtggaaaacgtgaaggtaatagattattatttatgcaatgcgtggaagtaaaataactggatgaattttcctggttcataaggcgctgcacatttattcatttttcatatttctttcttgtgcggcttgatacactacactaatggcaatgcccattttccttgttcttgctgtacacgctaattgtataaataactgcagaaacgaatttatgttggccgtggaatgcatgaaagtcaagctgttcttctgaagtaagttactctgttctgtttttcttctgttagagctttattctgcggaaaaaactcaattctcttctattcaactgagaaggtacacattattttggattttgctgctatgctccaagctttccttcagttactttgtccaggtaagttctatgcttagttatttgcaagcatgctttgatgagattgatctgaagcggtttaatttgcagatacaacctcttataaggcctaccaaggatataatgagtgttcataacattcgttatgagtggcatgagttttttccaaacggtaattccaatgctttttttggtgctgccttcattctggaaccctttttttactgataattcgttgccttttcagcatcttataatatcgctgctatcctatccctctgggcccctgttctgttggtatgctcttatccagcttgctagtgcaatgcatatccagcttatgcattagctgaaaattagcttcattattctcatttgtttcgaaactgcattctaaatcttggtttatcaactacaatgcttttattctcgtaggtctacttgatggatacacagatatggtacgccattttctctacaatatccggcggtatgtctggggcacttggacgacttggggaggtaatgatatatctgaactattatctgtaacatgttcttttgcttagtagtttagaacttataatgaccataagtatagggcaccccaagattgatggatagtcaaggggctttttctttttcttttcttttttgaaattttttaggagctttttctttattttgaggagtaatctgaatgtgtcgaggtctcggtcaattgcatgaaccaaatagctcttactttataaatgtaatggcgggctatgtagatggtaatacagttgtatgcagaatattttgttcgaggaagcttagcgaagtattttaataagtggaaatcaccttttttgtttttgcagcctgagaattcagaataaactacattagagtttaatggtaattttaagtagataaatatggaagtgtatgcacaaggcaaatgggatattaatttttaggaggatcctctgggagtcgcacttcagtcttgtttctgttatgcttatttactcaagggcattattgccgtatgttacaagaaaacctttttcatattcatgaaatgaaggaaaaaacgtattgctggtggcttggtgcatttacagtcgtctattctcctttttaactgtcgactttttttattagcactgccctttttactttgttatttccctacagcgttgtgcaactttctttttgcgagagttaagaagctgaacttcatactgttctggtttctgatggagttgttacactgatctattaccagattcgaacactaggaatgctgagatcacgatttcactctttgcctggagccttcaatacatatttggtgccatcagacaaaggcagaaacagacgttttacactctcaaagcgctttgcagaggtaccaaatgacaatgacgaaaattattgtcaagacttcactcataacccccctgaaaagtcatgatatgctgaagaatttaaagtacaggtttcccccaacaagagaactgaagctgccaagtttgctcaactgtggaatgaagtgatttgcagtttccgcgacgaagattttataagtgataagtgaggcccttagatcatgttcacctagaaaacattatcattgcaatgcagataatggaccttctgttatgcagggagatggacctactggtggttccatactcgtcagacccgagcctaaaattgatgcagtggccgttgttcttgcttgccagcaaggtttgacagaacaaatttaatatgtccactctaccttgttacatgtttgtgttcggatcactggaaatcattttcattgaaatttgcagatacctatagctttagacatggcagcacaatttagaccgagagacagtgatttgtggaagcgtatatgtgcagacgagtatatgaagtgcgctgtaattgaatgctacgagtcattcaaacttgttcttaatttagtggtggttggagaaaatgaaaaaaggtatcttcttatacttccatttttcacaccgtttcacgtatctctatatgagaaagacattgatgttgtttgtcgtagcttgtaggtattcagttaatgataacactaggaaataaatacttgcagacagtgtgcactatttttcttcaaaaaagtcgttactagtacctagtaggtctgttttgcctgcacagtacctattaggttataatttctatgattttctaaggctcctctgttgacgaattcttgtcacttttgagcaagaccgggccacccaggaaatcatttgtttcgttccaacatgaataaaacattcttaccataaaatgggaaacacgcaggatcagggcaagtatttttgaacatataaagtggtcagacatggctgaatgtttgtagtttgaacatgcaacgttttcattcgtagtaatgatgccaaaaatcaatataaacataatactaaaaaatctagggagaagttcaagattacaaatccattacttttaccaataaatatatctgtctagttgcgtatggctgcacatcatccacttgcaaatttaagaatcaagatattccaaattgaactagggagaaggactgccaagcacctccattgtgcaatatgcatggaagggaaaccatgattagttgtaactgctaaatgtgcaacgtctgttagataggcagccttagtactattgaaggcatatgtgtccttttttttgcggggaaaaggcatttgtgtccatctttcatgttagttggctttttttacagcattgctctttatcagtgcatgctcactgttatcttgatcttctactgacatgtttgttcattaacttcaacaggattattggcattataatcaaagagattgaagctaacatctcaaagaatacattccttgccaattttaggatgagcacattgccagtcctttgcaagaagtttgtggagcttgtatccaccttggtaagcaatgctgttacctctactgaacaccaaccctattgaagattgcattgcttgatatatttttagacaagtaacacgtttgattattgctactattatgtgatcacatctgcagaaagaaagagacgcctcaaaatttgataatgtagtgctgttgcttcaagacatgctggaagtgatcacgagggatatgatggtcaatgagatcaagtaataccttctgcacccattatactcatacatgtgccttgtcatagaaactggttactatatattttttaacatgtgttgtttatagagaactagctgaatttggtcatgggaacaaggatttagttccaagaagacaactttttgcgggcacaggcacaaaacctgcaattgttttcccaccaccaatttctgcgcagtgggaagaacaagtaataacaccatattcttatttggcttttgtaaaaaagaaggttcactaacttcacctatctacagattaagcgcttgtaccttcttttaactgttaaagaatcggcaatggatgtgcctacaaatcttgaagcccgccggagaatatcatttttcactaattcgctattcatggaaatgccacgtgcacctagagtgcgcaaaatgctctctttcaggtttgtctcgtatgtaaactttgcaacatatcgcagtgtcgtctacttttctaaatatactgcagtatcaaaaatcataatgcctagctaaattagctggattcactggagcctggtagctactggctaatggtccttttactgtgcttcttaaaaaagaattatatctgcttgtcaagaaatattttgggctgaattatggtatattattaactctgatcagtttgaaagaaaacatgaataattttgggtgtggaattgtgaatgtgtgctagtcaggaaaggggaaagcaccattaagaccaaggagaagcttatcaatgttgggattttttagctgaaattgttaatgtttgatgaattcgtattgtgaactaaatgacggggtgttcttaacttttacggtcaactgtttaggaatttgtttttgtttcaggttattattttgatcactaccatcctcatcgtcaaaaaaattcttgctgtcatttgatgtgtctaagctaaaaatggaagtatgagtgtcctgatgccataatagtatcaagttgcttttgaaactgtctttgagtctgtcactctcattgtctcagcagatttgcatgccccttttcggtattaactacaaactctctggagttttgagtcttgaccagttaacccaatggcgccatgatcagactagaaccaaagttcatctacagttttgatcagaattcactaaaagttgcattatgttacaactgattctgtactcatcagcttattttcgctagatggcaaacaaaaatttgtaaacagaaacgttgaactttcacaatgtctggcagtggcactctgtaatcttgttacctgtacaagtacatctgtgtccaccttaaaggaaaaatgcacctagatattctaaaaaagaagaacaagtggtgaacttcgaggtggaggcctgtacaacagaatgtgtgccacccatctttaagcgcattcataatcaaatcaacaacgtcaacaccagaaatatattatcagttcagaacaacaaatatctgataaaccgtatgtttaaatttgttctgtgatcataagagtttcagcgaaaaagattgggctctagatgattcatatgacacttgttctttgcagtgtaatgacaccatactacagtgaggaaactgtatattcaagaaacgaccttgatctggagaatgaggatggtgtatcaattatattctacctgcagaagatctttccaggttcatttcctgtttgatgtgttttaattactgcagttctttatgaatttggttgccaggtttttctcttctattcttgataattcttgttatatagatgaatggaataatttcatggaaaggattagttgcaaaagagaagctgaagtctggggaaatgaagaaaatgttcttcaacttcgtcactgggcctctctaagagggcagacactctgtcgaacaggtacttcagtcatacccttcaaccttgtcaaatatgaatcatttagttgattccctatttacatgtttttcatattgtgaatagtgagaggcatgatgtattataggaaagctttgaagcttcaagcattcctagacatggcttctgaatctggtgagcttcttcaacttcaaatttgagcattcctagacatgataagtgactcaactttgtactaaataagtgactcaactttgtactaaagttagtataaagctgagtcacttattctagaacggagggagtatttagcattcctagacatgttcacaagtataagatgttttggatatttcaatgtggactacatacggactgaaatgagtgaacaaacacagtaaatgcatctgtaaataaagttagaacatcttatatttgtggatggagagggtgccttttataaacaatccctgaatttatattgtagaactaggggagcaatcctcaatatttgcaaaaagggggatcttaggaatatttgagagtgagatgaatagttttttttttcatgaaggtaccatcaagagaagagaactaggtctacatattgtaccatctttttagaagttagacccaatcttatacgacacttggaaggggtcttacacattgaggatgttcttaagaccccccccccccccccccccccccgacacacacccgtgtatagcatactcaaaaaactgggcttacaggggacttatgcgaagtgtccaacatctaccctgctgtgtttgcagagatactagaaggctataaagccattgcagatcccgcagaggaagagaagaaaagccaaagatctctgtcttctcaacttgaagctatagcagatatgaaattcacatatgttgctacgtgccagatctatggaaatcagaaacagtcgggtgatcgacatgcaacagatattctgaacttgatggtgcagtaagtgatctttatctattctagaaactaatatacaacatttggccaagcgcaagatacatcatgtctaccccaatgagcaaaatgttttcttgtataactctttggagattgtgtgtctcggttatgtttatatttagttcacatttaattgataatgagatgttccttgagggaaaattgctgaattgcttgttttatccaaattgttatttcccactgtgcaaagtaattacagtttgaatttggaactacagttatcctggtctccgcgtggcatacattgatgaagttgaggagagggatggtgagaaggtgcaaaaggtcttctactcggtgctagtaaaagctcttgacaatcacgatcaggtaatcattttacgtgaagcgagttcaaactttcattttgtttctgatttaaacctcaatactcaatagtgtgtatcaggtaatcatttacgtgaagcgagttcaaactttaattttggttctgatttaaacctcagtactcagtaatgcgttatgtacttctttgtcctgtgaaggaaatataccgcataaaattgccagggacagcgaaattaggtgaagggaaacctgaaaaccaaaatcacgcgatcatttttacgcgcggagaagctttacagaccattgatatgaaccaggtgaacttcatggttatagtgcctttttagtaagtaggttgcattctgtccttttgtaattatcaatgctgtttaggacaattatttggaggaagctttaaaaatgcggaatttgctggaagaattcaatgagaatcatggtattcgtcctccaacaattcttggagtacgtgaacacatattcaccggaagtgtgtgttttaagctttgcagtagactttacttagttttctttataaaaattgcaaatcaatgcctaacatctgacattgctggattgtagcgtgtcatctcttgcctggtttatgtcaaaccaggaaaccagctttgtgacaataggacagagggttcttgccaatccattgaagtaagtctgaatatactttgatgtgtcctatttgaattaagcgcaatacatggttatcatatggagcatctatggtgactatctcctggatgagcgcttatgttttttttttatcagaccttgaaatgcacacatatgtttgttggagattagaagtaatacagacataaatactaaaacaaccaagtgctatttcctggaacatttctggcatcaaatcctttgaagctaaacaatgtcatcagcttaaagtgtgcattgtggtctaagtgctgtatatctgacatgctgtttcctgaaactttcctggcatcaagcttttcaaactaaacaatgccgtcaatttaaaggatgtattatggtggaagtgctgtatatctgacatgctgtttcctgtcagtaaagcttttcgagctaaacaatgtcgtgattttagaatgtgtattatgtctaagtgatttatatctgacatgctgtttcctgaaattttcctggcatcagagcttttcaagctaaacaatgttgttaatttaaattgcgtggttcggtcattgctatgtatctcacattctcttttctgggcagagtacgttttcactatggacatcctgatgtgtttgataggatttttcacattacaagaggtggaattagcaaggcttcctgtggtataaacttgagtgaagacatttttgctggtatgtacttttccacctattctagctgttacctgtggattttttagagaaatttctgaatggatggttccctgggatatccacatcctcatatatgtttgacaactgactcacacatgggcctatatgggcctcaaacagattactctaaactcgattaggactgatgctactcttatctaacacattaactcaaattccagcatttccaatttctgccctgggacaacacaaacttaatttttctttttcaggtttcaactcaactctgaggcgaggaaatgtcacccatcacgagtacattcaagttggaaaaggacgggatgttgggttgaatcaaatttcactctttgaggccaaagtggcatgtggcaatggagagcaagtgcttagcagagatatctaccgtttgggccaccgctttgacttcttccgaatgctctcatgttacttcacaactgtgggattttatgtcagctcaatggtacaaaacatctacatgcatcacatttcctttactaaaaaaaagcatgcatcacatttgtcttgatttgccatcgtccatgttttttatgttcttattattgtgcagatggttgtcataatagtatatgttttcctgtatggaaggctttatttagccctaagtggacttgagtttgcaattatgaagcaagcacgaatgagaggtaatcgtgctcttcaggcagccatggggtcccaatctattgtgcagctaggtcttttgatggccttacccatgtttatggagatcggactggaaaggggttttagaagcgccctgggggatttcatcatcatgcagctacagctatgtgcagtattctttaccttttccctcgggacaaaatcacattattttggccgcacaatcctccacggcggtgcaaaatatagagcaactggcagaggctttgttgttcgccatgtgaagtttgctgaaaattatagaatgtatagcaggagtcattttgtgaaaggacttgagctcatgttactacttgtagtgtatgagctctatggtgatgtggctacagattccactgcctatgttctgctgacatcatctatgtggttcttggtaatcacatggctgtttgctccattcctcttcaacccatcaggatttgaatggcaaaaggtggtcgatgattgggatgattggaacaaatggataagcagccgtggcgggattggtgtgccggccaataaggcctgggagtcgtggtgggaagaggagcaggaacatctgctgtctacaggcatagtcggccgcatatgggaaatcatattatctttccgattcttcatgtttcagtatggtatcatgtaccatttgaatatcgctgatggcaacaaaagcatatcagtaagtcatccttaattccttattaaatggatttcatgaaactgattacatgattttgttaattgtttataatcactgtttactgatacaatttagtgactgtcccttccaaacttgattttgtggcttcaggtttatggtctgtcttggctggtcattgtagcagtagtgttggtcctcaaggtaaatttcatttgcttgctgtcgatgaaatcaataagtacatattggttggcgtatgtgtatagtttatgtccttgttatgctgctgatatggtgccatttccttaggtggtgtctatgggaaaaaagaaatttagtgccgacttccagcttatgttccggctcctcaaattgttcttgttcattggatctgttggaactttggcgattcttttcacccttctgcaccttacagttggtgacatattcgccagcttccttgcctttgcacccacaggatgggccatcctgcaggtacatacatcatcagcaccaaagcttcccttttgttttgttttaaggttttactcccggcttatcctgcgcgaggactgaggagtgaggagcagtatcaattcttttttttccaaagggagaaagaaacggagaggatttttatcaagttaaagttgctattatcaaaactgacatctttcacaggctctaatccattcggcatcattgcaacagatatcacaggcaagcaagccagtggtgaaggctttaggactgtggggatctgtgaaggccttatccagggggtacgagtaccttatggggatcgtgatcttcgtgccagtggcggttctggcatggttccctttcgtctccgagttccagacgaggttgttattcaaccaggcattctcccgaggcctccaaatctctcgcattttggctggtgggaagaagcaaaactgaggtgagtctaggaggtggagtttccatcacagtaaggacacacagagtagaaggaggcagaaattagctccaggttcgttgtattagatatgggtgttgttggaggggggcatcacatggctgctaacatgctgacactttcagaagtttcttactcttgtacacacagggcggtttttcttaggcattttccatgtatatctcatgctaatacattcttacctctgttactagattgtatacgttgcttgtatagatagatgtatgcccccacaacagttgcgacaaaacattacagtccttttagaggcaaagatgaaactgatttttgtgcatgaagcaacaaaacagttcggtctttttaggttcagagacccaattgatttttgcgcatgaagatgtttgtgtttgtgctgtacggtgtaccagtcagtttcctgctttatgcttgggttatctgaaactttaaatttggactgatgtttgaacgcgctggcttttctcagctggggcctctgctttctattaaaagcagggccgtgtggccttttcctctaaaaaaaaacacccaattcatattacgctagatctcctttttta

SEQ ID NO: 250 - DNA, 648 bp, Hordeum vulgare
  source 1..648: mol_type = unassigned DNA
atggagagaacacaccgcctgctgctcgtcgcggggctcctcgccgcgctgctcccggcggcggccgccaccttcgggccgcagccgggggcgccgtgcgaccccgcgctcctggcgactcaggccgcgctcttctgcgcccccgacatgcccaccgcccagtgctgcgagcccgtcgtcgccgccgtcgacctcgggggcggcgtcccctgcctctgccgcgtcgccgccgagccgcagctcgtcatggccggcctcaacgccagccacctcctcaagctctacacctcctgcggcggtctccaggacggtgcccgcctcgccgccgcctgcgaaggacccgcacccccggccgccgtcgtcagcagcccaccaccacccccgccaccatcgccagcacctcgccgcaaacaggcagcacacgacgcgcctccaccgcagccgtcgagcgagaagccatcgtccccgccgccccaggagcatgccggcaacgccaaggccgcacccaaccaggcggctacttccccgctcgcgcccgctgccgccaccgccccgccgccccaggggccacactccgccgcgccgtcgtccgagacggccttcatcttcgccgccacggccatactcgccatctacatcatcctctga

SEQ ID NO: 251 - protein, 215 aa, Hordeum vulgare
MERTHRLLLVAGLLAALLPAAAATFGPQPGAPCDPALLATQAALFCAPDMPTAQCCEPVVAAVDLGGGVPCLCRVAAEPQLVMAGLNASHLLKLYTSCGGLQDGARLAAACEGPAPPAAVVSSPPPPPPPSPAPRRKQAAHDAPPPQPSSEKPSSPPPQEHAGNAKAAPNQAATSPLAPAAATAPPPQGPHSAAPSSETAFIFAATAILAIYIIL

SEQ ID NO: 252 - DNA, 3028 bp, Hordeum vulgare
  source 1..3028: mol_type = unassigned DNA
ttccggctaccaatacatgggcctcgcttgctcgcgctaaacaaagtcagtacagtgcgagaatccatgggccggtggagagctacctagttttggcgggaatccaatgccagaaatcactcacagtgcgagaatcgtccttctgacgccttccagacccttccacacgctcccacaggccctacccagccgtcggatctgatcagcacgaaagttaaagcgcaggatattcctcccatttcccgtcgctcgaagacagctcacgcactgtagccccgtttcaaaaatcaaaatcaaaatcaagaaaatctcctttgcctttctctcctcccgaggaggcggttacgagcgccaggagtgccacccaccctcacgtgcccagcgcggccccatctcgaccgtccaacccgacagctggccccaaccgacgcgcaggatcgacacacccatcgctggcttagcgtccacggctccaccggctggctatatagcccaccacccgctcaccaccggcattccattcctccctccctccctccctccaccgcgccaccagcagcgcgccccaaaccctagcgagcgagagagcccgcctcgcccatggagagaacacaccgcctgctgctcgtcgcggggctcctcgccgcgctgctcccggcggcggccgccaccttcgggccgcagccgggggcgccgtgcgaccccgcgctcctggcgactcaggccgcgctcttctgcgcccccgacatgcccaccgcccagtgctgcgagcccgtcgtcgccgccgtcgacctcgggggcggcgtcccctgcctctgccgcgtcgccgccgagccgcagctcgtcatggccggcctcaacgccagccacctcctcaagctctacacctcctgcggcggtctccaggacggtgcccgcctcgccgccgcctgcgaaggtacgcgccccaccaccgcctccctctctccctccctctctgcctgccttcctcgaaatttctcatggtttctccgagttggtagggttccgatttgggttggtttccttgcgttgtccgccagatctgccggtccggcgcgcgggcgtcgggctctcgtcgtgtcccgtggcgagcagcccgcacccgcgcacggcctagttcatcgtcgacgaattaatgcatgtggcatgctcgattattgtttcatcgattttggatctgtgccgctcgatatatatagatagacctgcgagttatttcttgtccctgtgctgcatctagtgcataaccctcctccgttatttttttccatttatatatgattacttgtgaaaacgcgatggatctagcgccgtacgtgcagatgcagaggtcctatatttttattttttccatttatatatgattacttgtgtgaatttgttcatctgcaagtcttgaggtttttgttgctcgacttactcttcctgctgacgctatagtaatcgatcatgtccacgcgtttgctgctagtactgttaaatgttaatcacctgctccatcccgttcgtgatagtcgtcttttgtcttgtttgtcctgcgcggtcttggtcaaaactgaaaacgctccttgctactcatatttgatcgatcaaccgacgccagaggcagagcaaaagcatgcgtgcttttcgctgtgcagtgcatcgtctcttcctcttttgcacgtggttgatcctctggcagtctacttttatgcatgcagtttccgtagccttcctcaatcgtgaaaaaaacgtagggtcaaatgaatcgcctaccctatcctactgtcagagcattgcgcggcaaccgatagctggctagctgctgcagctttaacagagtcagtctgtggcgataaccctctgtttttatgatatttgtttatgccactgcgtttcttttcttgttgcgcacgtcatcacctccttcttgttttttcattctcgatttcttttgaacgcagtaactaacttttcttgttgtttttactgtgggttttggacgcaggacccgcacccccggccgccgtcgtcagcagcccaccaccacccccgccaccatcgccagcacctcgccgcaaacaggcagcacgtacgaacctctccctctctctctctcgcctgcatctcgctctgtacataactgattgggttcatctttctacatactaacatctgtctttgattggttgtcgcagacgacgcgcctccaccgcagccgtcgagcgagaagccatcgtccccgccgccccaggagcatgccggcaacgccaaggccgcacccaaccaggcggctacttccccgctcgcgcccgctgccgccaccgccccgccgccccaggggccacactccgccgcgccgtcgtccgagacggccttcatcttcgccgccacggccatactcgccatctacatcatcctctgaagggcctaccccaaatgcagtagcctacttgtcgtctgattccgtttcatgcttgtccccatttgttgaggttcgtttctgcagtccgaacaagacggtgggattttgaccgggtacccatatttctatgtcgcgcgtactagtactagtagtagctgtcagcagacgaatgaacattgggttttgggattcctctagctgatgaaccactgctatttgctatgttatcgatggatatgatctgaatggatgggtgaagttttggtttctgatgctgatgttgtgatgcttcttcatttgcatgctcgatctatctgccttcaatccctttaaatttctggagcaacagttagtttttgtactttgtatatcttttcttctgctatgaatcaatgaatacctcttgcatgttgcctgtgctagctttgtacagaatgcagacattggtaccgtcccaaataatctgttgcttgccatgttatgcacaccttcacacaacaacagaagctgaagctttctattgatttttatgccggtacaaatccagggtgcggtttgatttgatcccggccggtaacttgatgcgagcttctctgtccc

SEQ ID NO: 253 - DNA, 23 bp, synthetic construct
  source 1..23: mol_type = other DNA
gtattgaagaagttttatcaggg

SEQ ID NO: 254 - DNA, 23 bp, synthetic construct
  source 1..23: mol_type = other DNA
tatatcctcggacggagagatgg

SEQ ID NO: 255 - DNA, 23 bp, synthetic construct
  source 1..23: mol_type = other DNA
cagccccgcggtggaggagaagg

SEQ ID NO: 256 - DNA, 23 bp, synthetic construct
  source 1..23: mol_type = other DNA
cagccccgcggtggaggataagg

SEQ ID NO: 257 - DNA, 2538 bp, Triticum aestivum; identical to SEQ ID NO: 225
  source 1..2538: mol_type = unassigned DNA

SEQ ID NO: 258 - DNA, 2538 bp, synthetic construct
  source 1..2538: mol_type = other DNA
atggtgcgccgcggggcgctcccgctggcgctgctggccgtgctcgcgacgctgacggccgtggcggggcaggggaagccggtcacggacaacggctcgggcggcgggtcggggccgtccaagttcacgcccaaggacgccttctacatcgactgcggcggcacggccgccgccgacaccaaggacggcaagtccttcaagaccgacgcggaggccaacagcctgctctccgccagggacaacatcaaggtcgccgacgacaaggccgacgtgccgtcgcacctctaccgctccgcgcgggtcttcaaggaggaggccgtctacaacttcccgctcacggcccccggctggcacttcatccggctctacttcttccccatcaagagcggggaggccgacctcgcggcggccacgttcgacgtgtccaccgccgttaacgtccttctccacggcttcacccccgaggcgaaggcggtcatgaaggagtacatcgtcaacgccacggagaacaagctcgagctcaagttcaccccgcagtcgggctcggcgttcatcaacgccatcgaggtcgtcaacgcccccgacgagctcatcagcaagacggccctgacggtgtcgccgctagccgagacaagcgggttgtcagaggctgcgtaccaggtggtgtgccggctcaacgtcggtggcccgcccatcggccccgtgaacgacacgctcggccggcagtgggaggacgacgggcagtacctgaaccccaaggacgccgggacggaggtgtcggtgccgacgagcgcgatcaagtaccccgacgcgttcccggcgaccaagctcgtggcacccacggcggtgtacgcgaccgcccgccacatggctgaatccggcgtcgcgaaccagaacttcaacgtgtcgtggaaggtggacgtggacccgtcgttcgactatctcgtccgcctcttcttcgccgacatcataagcacgtccgccaacgacctctacttcaacgcgtacatcaacggccgcaaggccatctccgccctggacctctccaccatcaccggcgacctggccgcgccctactacaaggacttcgtggtgaactcgtcggtcaacaccgacggccacattatcatcggggtcgggccgctggggcaggacacgggccgcaacgacgcgctgctcaacggcgcggaggtgctcaagatgagcaactcggtgggcagcctggacggcgagttcggcgtggacggccggatggtggacgacggcagcggcacccgcaaagtggtcgctgccgtggggttcgccatgatgttcggcgccttcgccggcctgggatgcatggtggtgaagtggcaccggcggccgcaggactgggaccggcgcaacagcttctcgtcgtggctgctgcccatccacacgggccagtccttctccaacggcaaggggtccaagagcggctacaccttatcctccaccgcggggctgggccacttcttcaccttcgcggagatgtcagaggcgaccaagaacttcgacgagagcgccatcatcggcgtgggagggttcggcaacgtgtacgtgggcgagatcaacgaccccgacgaggaggggtccaggatcaaggtggccatcaagcgcgggaacccgtcgtcggagcagggcatcaacgagttcaacaccgagatccagatgctgtccaagctccggcaccgccacctcgtgtccctcatcggctactgcgacgagggcgaggagatgatcctcgtctacgagttcatgcagcacgggcccttccgcgaccacatctacggcggccccgagggcctgcccacgctctcctggaagcagcgcctcgagatctgcatcggcgccgccaggggcctccactacctccacaccggcaccgcgcacgggatcatccaccgggacgtcaagaccaccaacatcctcctcgacgaaaagttcgtggccaaggtggccgacttcggcctctccaaggacggccccgggatgaaccagctgcacgtcagcaccgccgtcaagggcagcttcgggtacctcgacccggagtacttccggtgccagcagctgaccgacaagtcggacgtctactccttcggggtggtgctgctggagacgctgtgcgcgcgggcgcccatcgacccgcagctgccgcgcgagcaggtcagcctcgccgagtggggcctgcagtggaagcgcaagggcctcatcgagaagatcatggaccccaacctcaacggcaaggtcaacccggagtcgctcgccaagttcgccgagaccgccgagaagtgcctctgcgagttcggcagcgaccgcctctccatgggcgacgtgctctggaacctcgagtacgcgctgcagctgcaggaggccaacccgcccgagggcgccaccgacgccgacgacgccgacgcctccatcgtctcctccgccagcggcgtcaccaccgtgcccgaccagtccaccacctccgccaacgagctcttcgcgcagctcgccgacatgaaggggagatga

SEQ ID NO: 259 - DNA, 14547 bp, synthetic construct
  source 1..14547: mol_type = other DNA
ataacttcgtataatgtatgctatacgaagttatcgatgcacaccttcggtggggcgttgtgaaaaagcatgttttttgggtcgacaagccccttttgcaacgtatcctcttctaatcctattcagatcattaacatcataagctgcaattgacatgctcttctgaggatcaggttcatgcaattaaacatcataaactgcatctttgatgtcatccttttcctatattttttccagattattggcttgcttcgttttcaatatcaggttctatgattcgacttctgttgttgccagtaataatttgtagttgctgcggaatatgaactcaaggagagctgatggtgctatgaagttgatttgatgggaggttgttctacacctgcacttgctgctcgacttaaatacatgccttggatttcttcccagctctagtacataatatttttcaaattaatgttccacgacataaaatttaaatccacaaacatatttttagtacatgaacaattttctaatatagggcaaacatttttcatatacaaaccgatcattttaatatatggtgaaaatcagtgtaatatatgctgaaatgttttcaaatacatattgaacatatttataataaatggtgaacattttttttaataattgatgaccatttttaaaatgcatattgaacattttataatatacactgtacagttttataataatcgacgaacatcttttggagttctgaacatttttttcaaaaacacaagccattttccaggaagaatacaaatgcaaaagaaatgagatatccaaaaagcaaaaaagaaaaacaaaacaaaacagagaaacctacaggaaaatccaaacagaaaaggcaaagaaagaacccgaactgggccaggcaatgtttccaacggcctcgctcttcctgaacaagaaggccagtcagcccatgggctgctcccagtactcgggccccgctgtggcagcacgccatgtaatagttttcgcgggaatccaacgccgaaatcgcccgcagcgggaacccgacgtcggtctggtgcgttctggcgccttccagaactctccacaggctcccgcagccgtccgatcagatcagcacgaagcacgaacattggcgcgcggcgatattttctttcctcgcccgacgacggccgcactgcatttcattttgaatttcaaaattcggaaacggaaaagctttctcgcatcccgaggcgaggcggttacgggcgccagaggggccaccccacccacccacccccgccctcacgtgccccgcgcggccgcatccgggccgtccgcgcggacagctggccgcgcccagcccgaaccgacgcccaggatcgagcgagggcggcgcgcccggggcttggcttagcgtccacgccacctccggctatataagccgccccacacccgctccccctccggcattccattccgccaccgcaccaccaccaccaccaaaccctagcgagcgagcgagggagagagagaccgccccgccgcgacgatggagagatcccgcgggctgctgctggtggcggggctgctggcggcgctgctgccggcggcggcggcgcagccgggggcgccgtgcgagcccgcgctgctggcgacgcaggtggcgctcttctgcgcgcccgacatgccgacggcccagtgctgcgagcccgtcgtcgccgccgtcgacctcggcggcggggtgccctgcctctgccgcgtcgccgccgagccgcagctcgtcatggcgggcctcaacgccacccacctcctcacgctctacagctcctgcggcggcctccgccccggcggcgcccacctcgccgccgcctgcgaaggtacgttgtccgcctcctcccctccctccctccctccctctctctctacgtgctcgctttcctgcttacctagtagtacgtagtttcccatgccttcttgactcgctagaagtgctccggtttgggtctgttaatttcctcgctgtactaccggatctgtcgtcggcacggcgcgcggcgtcgggtcctcgccttctcccgtggcgaccgacctgcgcagcgcgcgcgcggcctagctagcttcataccgctgtacctcgacatacacggagcgatctatggtctactctgagtatttcctcatcgtagaacgcatgcgccgctcgcgattgtttcgtcgattctagatccgtgcttgttcccgcgagttagtatgcatctgcgtgcatatgccgtacgcacgcagatgcagagtctgttgctcgagttatctactgtcgttcgctcgaccatatttgcctgttaatttcctgttcatcgtgcatgcagtagtagtagccatgtccacgccttcttgttttgaggcgatcatcgtcgagatccatggctttgctttctgcactatcttctgccttgttttgttctccgcagtacgtacgtcttgcttggtcaaaactgaaaaacgctttgctgtttgtttgatcggcaagagctggccgtgcttttggcaccgcagtgcgtcgcctctgccgcttttgcgaaacatttccatgttgatcctctggcggaactactttttcgcgtgcggtttgcgtggccttcctctctcgtgaaaagaggtcgggtcaaaccaaatggatcgcctcttggcagagcagcggcagcagatagctggccgtctcgcagctttggcagaaccggtctgtggccatctgtcgccgcctgccaccgtttccctgatgtttgtttctctctcgcctgccactgtttcttttcttgttgcgcacgtacgtcgtcacctcctcctacttttttgccagttttgtttacttttgatgaaatatacggatgaatcggctggtgattaactttggctgctgctgttaattactgtggattttggatgcaggacccgctcccccggccgccgtcgtcagcagccccccgcccccgcctccaccgtccgccgcacctcgccgcaagcagccagcgcgtaagaacctctccctctccctctctctctccctctcgcctgcatctcgctatgtttatccatgtccatatgttgatcagccttgtttagttactaacatgtgcaccggatcgggttctcgcagacgacgcaccaccgccgccaccgccgtcgagcgagaagccgtcgtccccgccgccgtcccaggaccacgacggcgccgccccccgcgccaaggccgcgcccgcccaggcggccacctccacgctcgcgcccgccgccgccgccaccgccccgccgccccaggcgccgcactccgccgcgcccacggcgccgtccaaggcggccttcttcttcgtcgccacggccatgctcggcctctacatcatcctctgagtcgcgcgccgaccccgcgagagaccgtggtccgtccagtcgcagtagagtagagcgctcgtcgtctcgttccgtttcgtgcctgtcgccgttcgaggttcgtttctgcgtgcagtccggtcgaagaagccggtgggttttgagtactagtggtagtagtagcagcagctatcgtttctgtccgctcgtacgtgtttgcgtggtcgcggagaacaattaattgggtgtttgcgagtcctctggttaagatgaaccactgatgctatgtgatcgatcgatcggtatgatctgaatggaaatggatcaagttttgcgttctgctgatgatgtgatccatttggatctgtgtggggcaacagtttcgcttgcttttgctctgcgatgaacgaatgcttcttgcatgcatcttgtctttgcttaatttgaactgtagaacggatgcagtactgatttctgcttatgatgtgacgattcgtcgtacgcatatcatctcttcaaatttgtgtagcagctgtttgtagcttccattctgctatggacgaatgcctgtttttcacggagaaccgcgcgcggggaccgatgcggctttgtgttgccatgagctttgagtggccgtagatttgcaaaagcaatggctaacagacacatattctgccaaaccccaagaaggataatcacttttcttagataaaaaagaacagaccaatatacaaacatccacacttctgcaaacaatacatcagaactaggattacgccgattacgtggctttagcagactgtccaaaaatctgttttgcaaagctccaattgctccttgcttatccagcttcttttgtgttggcaaactgcgcttttccaaccgattttgttcttctcgcgctttcttcttaggctaaacaaacctcaccgtgcacgcagccatggtcctgaaccttcacctcgtccctataaaagcctagccaaccttcacaatcttatcatcacccacaacaccgagcaccacaaactagagatccgaattcctgcagcccatcccaccatgcggaagttctccgaaatagctactcagcggtgtggtaatcgatcaatggcgctatcagctcctcccagtcaggaacagccgtcggggaagcaattcggctaccagctcgctgctgctgtgaggagcatcaactggacttatggcatattttggtccatttccgccagcccgcgcccaggccactcctcagttctggcgtggaaggatgggttctacaacggcgagataaagactagaaagattaccggctcgaccactacggagcttacagcggacgagcgcgtcatgcacagaagcaagcaactgagggagctctacgaatcgctcttgcccggcaactccaacaaccgggcaaggcgaccaaccgcctcactgtcaccggaggatctcggggacggcgagtggtattacaccataagcatgacttacaccttccaccctaatcaagggttgccaggcaaaagctttgcgagcaatcaacatgtttggctgtacaacgctcaatacgcaaacaccagagttttcccccgcgcgctcttagcaaagacaatcgtttgcattcccttcatgggcggtgtgcttgagctcggaacgtcggatcaggtgttggaggacccgagcatggtgaagcggatcagcacgtctttctgggagctgcacttgccgtcatccttggagtcgaaggatccgagctccagcacatcagcaaacgataccagggaggccaccgacatcatcttgttcgaggatttcgaccacaacgacacagttgagggggtgatctctgagcaaagggaggtccagtgcccgtccaacgtcaatctggagcgcctcacaaagcagatggacgagttccacagccttctcggtggactggacgtgcatcctctcgaagacagatggatcatggacgagccctttgagtttacgttttccccagaagtggcgccggctatggatatgccgagcaccgacgatgtcatcgtcactttaagtaggtccgaaggctctcgtccatcctgcttcacagcgtggaagggatcatccgagtcgaaatacgtggctggccaggtcgttggggagtcacagaagttgctgaataaagttgtggctggtggtgcatgggcgagcaattatggcggtcgcaccatggtgagagctcagggaattaacagcaacacccatgtcatgacagagagaagacgccgggagaaactcaacgagatgttcctggttctcaagtcactggtcccgtccattcacaaggtagacaaagcatccatcctcacagaaacgataggttatcttagagaactgaagcaaagggtagatcagctagaatccagccggtcaccgtctcacccaaaagaaacaacaggaccgagcagaagccatgtcgtcggcgctaggaagaagatagtctcggccggatccaagaggaaggcgccagggctggagagcccgagcaatgtcgtgaacgtgacgatgctggacaaggtggtgctgttggaggtgcagtgcccgtggaaggagctgctgatgacacaagtgtttgacgccatcaagagcctctgtctggacgttgtctccgtgcaggcatccacatcaggtggccgtcttgacctcaagatacgagctaatcagcagcttgcggtcggttctgctatggtggcacctggggcaatcaccgaaacacttcagaaagctatataggcaagatgttttttgacattagtgtagtgctaaaaccgtcttatatttgggacgaagggagtacttagcgacgcaatctacaaaaaatcatgagttgggctctatagtcttcttcacccaggaatcaggtcggactagtgtgaattactgtacaccaaaaaaaaattccgaaataattactgaacacgtcatgacctcgccccaaaaaatatccagatctatattccgcctatcaattaagcacgaagtttgaagggagtgcctagaactcatttagatgagatataatttggtctcattcaccttgaaaacgaaaacaaaaacaacccacgtcagcacacacgcatcttatagcatcacatccaatggctataaaaggtgaatgacagcaaattatacctcatctagatgagttctagcaaaactgtaatttgaagccgactatgctgcccgaccctactcactactacagaaatgcctagctagcggtggcggcactaagagcccattcggattctttccagcttcctgcgatgccagccacagccagcttctgatgggatgggagtagcgtttcgttcgacagcagagggtagctctgaagttcctattctctagaaagtataggaacttcggtcgagtcattcatatgcttgagaagagagtcgggatagtccaaaataaaacaaaggtaagattacctggtcaaaagtgaaaacatcagttaaaaggtggtataaagtaaaatatcggtaataaaaggtggcccaaagtgaaatttactcttttctactattataaaaattgaggatgtttttgtcggtactttgatacgtcatttttgtatgaattggtttttaagtttattcgcttttggaaatgcatatctgtatttgagtcgggttttaagttcgtttgcttttgtaaatacagagggatttgtataagaaatatctttaaaaaaacccatatgctaatttgacataatttttgagaaaaatatatattcaggcgaattctcacaatgaacaataataagattaaaatagctttcccccgttgcagcgcatgggtattttttctagtaaaaataaaagataaacttagactccaaacatttacaaaaacaacccctaaagttcctaaagcccaaagtgctatccacgatccatagcaagcccagcccaacccaacccaacccaacccaccccagtccagccaactggacaatagtctccacacccccccactatcaccgtgagttgtccgcacgcaccgcacgtctcgctgcccaaaaaaaaaaaaggaaggaaaaaaaggaaaaggaaaaacagcaggtgggtccgggtcgtgggggccggaaacgcgaggaggatcgcgagccagcgacgaggccggccctccctccgcttccaaagaaacgccccccatcgccactatatacatacccccccctctcctcccatccccccaaccctaccaccaccaccaccaccacctccacctcctcccccctcgctgccggacgacgagctcctcccccctccccctccgccgccgccgcgccggtaaccaccccgcccctctcctctttctttctccgttttttttttccgtctcggtctcgatctttggccttggtagtttgggtgggcgagaggcggcttcgtgcgcgcccagatcggtgcgcgggaggggcgggatctcgcggctggggctctcgccggcgtggatccggcccggatctcgcggggaatggggctctcggatgtagatctgcgatccgccgttgttgggggagatgatggggggtttaaaatttccgccatgctaaacaagatcaggaagaggggaaaagggcactatggtttatatttttatatatttctgctgcttcgtcaggcttagatgtgctagatctttctttcttctttttgtgggtagaatttgaatccctcagcattgttcatcggtagtttttcttttcatgatttgtgacaaatgcagcctcgtgcggagcttttttgtaggtagacgataagcttgatgatccgtcgatcgtttcgcatgattgaacaagatggattgcacgcaggttctccggccgcttgggtggagaggctattcggctatgactgggcacaacagacaatcggctgctctgatgccgccgtgttccggctgtcagcgcaggggcgcccggttctttttgtcaagaccgacctgtccggtgccctgaatgaactgcaggacgaggcagcgcggctatcgtggctggccacgacgggcgttccttgcgcagctgtgctcgacgttgtcactgaagcgggaagggactggctgctattgggcgaagtgccggggcaggatctcctgtcatctcaccttgctcctgccgagaaagtatccatcatggctgatgcaatgcggcggctgcatacgcttgatccggctacctgcccattcgaccaccaagcgaaacatcgcatcgagcgagcacgtactcggatggaagccggtcttgtcgatcaggatgatctggacgaagagcatcaggggctcgcgccagccgaactgttcgccaggctcaaggcgcgcatgcccgacggcgaggatctcgtcgtgacccatggcgatgcctgcttgccgaatatcatggtggaaaatggccgcttttctggattcatcgactgtggccggctgggtgtggcggaccgctatcaggacatagcgttggctacccgtgatattgctgaagagcttggcggcgaatgggctgaccgcttcctcgtgctttacggtatcgccgctcccgattcgcagcgcatcgccttctatcgccttcttgacgagttcttctgagcgggactctggggttcgaaatgaccgaccaagcgacgcccaacctgccatcacgagatttcgattccaccgccgccttctatgaaaggttgggcttcggaatcgttttccgggacgccggctggatgatcctccagcgcggggatctcatgctggagttcttcgcccacccccggatccccgatcgttcaaacatttggcaataaagtttcttaagattgaatcctgttgccggtcttgcgatgattatcatataatttctgttgaattacgttaagcatgtaataattaacatgtaatgcatgacgttatttatgagatgggtttttatgattagagtcccgcaattatacatttaatacgcgatagaaaacaaaatatagcgcgcaaactaggataaattatcgcgcgcggtgtcatctatgttactagatcataacttcgtataatgtatgctatacgaagttatttatcattgcaaggaaaaaataatctagagggttctccggaaaaaaaaccaggccacacaccctgtccctgacagtgagtcccatgccatgatggtgcgatcgtcaacgtcacagatgtatagaaacaagatttgaaccgtatatgcacgtctatgccaagttacggaaccagttcaatgtattttgcaaatttggacactaaagtgcacattcgtggcaagttcaagcaccagtggtgtatttacctcttttatctatctatgctttcgaactatctatctagttgcaccgatgtaaaatacctttgtattgttttttatctatccaatctatcgtttttttatctatgcttctgatgtaaaaatgttgtagaatgagcgcgagatgctggagcgcgcgcgctgcattttagcgcggctgctggagccagcactgcgcgccgcgccaaaccagacaatgggcgcgcggcaaagcagtttttagcgcgttcggcgcctgttggagatgctctaaggctgctatttctaacggtttttcttaatccccacaaaaaaaacagtttttcttatagtcttgctaaatctttgtcgactaagacttcgttttgtctcagccgatgctatattcgtaaaatcttacattgagatccgtgtatttttttttctgttttctatctttatacatgttatgtcactcgaccgagagttactgaaacatagccacactttttttccttagagggtgtttgtttccagggacttattggtctaggaacttaaataagtccctataagtcccatctaaaccaaacaagagggacttatagggacttaaagtgggcatttaggacttatgaaataaaaccctcaaggagggacttatagttgtaatatggtcttatagagacttataagtcccagaaaccaaacagatagggactttttagggacttgggacttataagttgggactaaaaaaagtcctaagacttatgaaccaaacagggccttagtatgaattgctggtttcacaatgggcgatgaaagataacctcaaacagttttgctaaagcacatctagatgtgccataagtattgcacatctaagttctatgtcattgattttgcatcgagatttgtgtgaatattttttttttgtgcttgattcactcacttagatgtgcaataactaaagcacatctagatgtgccctagacacacccaacctcaaaaccaggccgggtggctcctggaaagacctgcaacatcgatcgcatctccatctttctcttctcccattggcgtgcaactagcacaagctccaatcatggtcaccgtcgatcgttgagccagcagcaacaaccacaagctccaagaatagccatgtgcagaatgacttgcgtcaatggtggacgagcccccaaacatagcacgccgacgcccgggtcaaaccggcttaaacttggcatggcgccacccaccaccgcttaacccccgcccatttctccctccccctcaagtctcctccgcccccttccctctcctccgattggccccgcccaaccagagagagggcgagagggcgccaccccagccaggcccaggccaccacaataacaaaaatcagcacgacgacgtccccggcgtcgggcgctgcgcgtcgaggtggcggcggcggccgcggtgtcgacttgagcggcggcacaacagcagcgtgtgggcgagggtgacgaggacaagcaccgcgcttaagatggtgcgccgcggggcgctcccgctggcgctgctggccgtgctcgcgacgctgacggccgtggcggggcaggggaagccggtcacggacaacggctcgggcggcgggtcggggccgtccaagttcacgcccaaggacgccttctacatcgactgcggcggcacggccgccgccgacaccaaggacggcaagtccttcaagaccgacgcggaggccaacagcctgctctccgccagggacaacatcaaggtcgccgacgacaaggccgacgtgccgtcgcacctctaccgctccgcgcgggtcttcaaggaggaggccgtctacaacttcccgctcacggcccccggctggcacttcatccggctctacttcttccccatcaagagcggggaggccgacctcgcggcggccacgttcgacgtgtccaccgccgttaacgtccttctccacggcttcacccccgaggcgaaggcggtcatgaaggagtacatcgtcaacgccacggagaacaagctcgagctcaagttcaccccgcagtcgggctcggcgttcatcaacgccatcgaggtcgtcaacgcccccgacgagctcatcagcaagacggccctgacggtgtcgccgctagccgagacaagcgggttgtcagaggctgcgtaccaggtggtgtgccggctcaacgtcggtggcccgcccatcggccccgtgaacgacacgctcggccggcagtgggaggacgacgggcagtacctgaaccccaaggacgccgggacggaggtgtcggtgccgacgagcgcgatcaagtaccccgacgcgttcccggcgaccaagctcgtggcacccacggcggtgtacgcgaccgcccgccacatggctgaatccggcgtcgcgaaccagaacttcaacgtgtcgtggaaggtggacgtggacccgtcgttcgactatctcgtccgcctcttcttcgccgacatcataagcacgtccgccaacgacctctacttcaacgcgtacatcaacggccgcaaggccatctccgccctggacctctccaccatcaccggcgacctggccgcgccctactacaaggacttcgtggtgaactcgtcggtcaacaccgacggccacattatcatcggggtcgggccgctggggcaggacacgggccgcaacgacgcgctgctcaacggcgcggaggtgctcaagatgagcaactcggtgggcagcctggacggcgagttcggcgtggacggccggatggtggacgacggcagcggcacccgcaaagtggtcgctgccgtggggttcgccatgatgttcggcgccttcgccggcctgggatgcatggtggtgaagtggcaccggcggccgcaggactgggaccggcgcaacagcttctcgtcgtggctgctgcccatccacacgggccagtccttctccaacggcaaggggtccaagagcggctacaccttctcctccaccgcggggctgggccacttcttcaccttcgcggagatgtcagaggcgaccaagaacttcgacgagagcgccatcatcggcgtgggagggttcggcaacgtgtacgtgggcgagatcaacgaccccgacgaggaggggtccaggatcaaggtggccatcaagcgcgggaacccgtcgtcggagcagggcatcaacgagttcaacaccgagatccagatgctgtccaagctccggcaccgccacctcgtgtccctcatcggctactgcgacgagggcgaggagatgatcctcgtctacgagttcatgcagcacgggcccttccgcgaccacatctacggcggccccgagggcctgcccacgctctcctggaagcagcgcctcgagatctgcatcggcgccgccaggggcctccactacctccacaccggcaccgcgcacgggatcatccaccgggacgtcaagaccaccaacatcctcctcgacgaaaagttcgtggccaaggtggccgacttcggcctctccaaggacggccccgggatgaaccagctgcacgtcagcaccgccgtcaagggcagcttcgggtacctcgacccggagtacttccggtgccagcagctgaccgacaagtcggacgtctactccttcggggtggtgctgctggagacgctgtgcgcgcgggcgcccatcgacccgcagctgccgcgcgagcaggtcagcctcgccgagtggggcctgcagtggaagcgcaagggcctcatcgagaagatcatggaccccaacctcaacggcaaggtcaacccggagtcgctcgccaagttcgccgagaccgccgagaagtgcctctgcgagttcggcagcgaccgcctctccatgggcgacgtgctctggaacctcgagtacgcgctgcagctgcaggaggccaacccgcccgagggcgccaccgacgccgacgacgccgacgcctccatcgtctcctccgccagcggcgtcaccaccgtgcccgaccagtccaccacctccgccaacgagctcttcgcgcagctcgccgacatgaaggggagatgatccatcgtctgaatcgatcatccatccctccacgcgtcgccgtcagtcctcaccgatcgagcagcaccgccctagttcgtcaatccgtgcgcgcgccttctgcatgccagtccatgcatgcatccatggtggaacggatcaaggaaggatccgatcataactcaaaaccaaaccaggtcgatcgaagagtgtatatatgtgtgtaatgtatgtatgtgtctcaatcgcgtttaccgatgcagaaaattccaaaatgtataccgcaactgtatgtaaaatcatggcgtcaattacactttgtctcacaaaaagtgttgattttgttagcatgcattcagctggagctcatttctcttttcccccgcataacaaagagctcgtttctcttaatattgattggattattagtaggatttccagccagaaagctgaggatcttgttatcggatttttctatgtatgagatttatattgctgaattttctatggaacaaaataagagtcctggtcctgctggtctcccattgagttttaccacatatgatgcaatttgattaaatggtgtctaaaagctatgattgatgatttccagagaggtaacattagcattgctaccttgagctatggaattatcacattgattcctaaaagcagtgatggtaaacaaattcaaaattgctggcccatttccctcttgaatgttagtttaaatttttttcactaaaatctttatgaatagattgagaagttcctattctctagaaagtataggaacttc

SEQ ID NO: 260 - DNA, 23 bp, synthetic construct
  source 1..23: mol_type = other DNA
gatgcactttgtgtgtttgatgg

SEQ ID NO: 261 - DNA, 23 bp, synthetic construct
  source 1..23: mol_type = other DNA
gatgcactttgtgtatttgatgg

SEQ ID NO: 262 - DNA, 23 bp, synthetic construct
  source 1..23: mol_type = other DNA
ggctcgcagcactgcgccgtcgg

SEQ ID NO: 263 - DNA, 23 bp, synthetic construct
  source 1..23: mol_type = other DNA
ggctcgcagcactgggccgtcgg

SEQ ID NO: 264 - DNA, 23 bp, synthetic construct
  source 1..23: mol_type = other DNA
ccttctcctccaccgcggggctg

SEQ ID NO: 265 - DNA, 23 bp, synthetic construct
  source 1..23: mol_type = other DNA
ccttctcatccaccgcggggctg

SEQ ID NO: 266 - DNA, 23 bp, synthetic construct
  source 1..23: mol_type = other DNA
gtggcccagccccgcggtggagg

SEQ ID NO: 267 - DNA, 23 bp, synthetic construct
  source 1..23: mol_type = other DNA
ggctcgcagcactgcgccgtcgg
